United States Patent Application Publication US 2026/0275314 A1, published September 17, 2026 (application 19/167,963).

The application's sequence listing, which the Patent Office published only in electronic form, follows.

SEQUENCE LISTING (6480 sequences)

SEQ ID NO: 1 - protein, 743 aa, synthetic construct
MAADGYLPDWLEDNLSEGIREWWALKPGAPQPKANQQHQDNARGLVLPGYKYLGPGNGLDKGEPVNAADAAALEHDKAYDQQLKAGDNPYLKYNHADAEFQERLKEDTSFGGNLGRAVFQAKKRLLEPLGLVEEAAKTAPGKKRPVEQSPQEPDSSAGIGKSGAQPAKKRLNFGQTGDTESVPDPQPIGEPPAAPSGVGSLTMASGGGAPVADNNEGADGVGSSSGNWHCDSQWLGDRVITTSTRTWALPTYNNHLYKQISNSTSGGSSNDNAYFGYSTPWGYFDFNRFHCHFSPRDWQRLINNNWGFRPKRLNFKLFNIQVKEVTDNNGVKTIANNLTSTVQVFTDSDYQLPYVLGSAHEGCLPPFPADVFMIPQYGYLTLNDGSQAVGRSSFYCLEYFPSQMLRTGNNFQFSYEFENVPFHSSYAHSQSLDRLMNPLIDQYLYYLSKTINGSGQNQQTLKFSVAGPSNMAVQGRNYIPGPSYRQQRVSTTVTQNNNSEFAWPGASSWALNGRNSLMNPGPAMASHKEGEDRFFPLSGSLIFGKQGTGRDNVDADKVMITNEEEIKTTNPVATESYGQVATNHQSDGTLAVPFKAQAQTGWVQNQGILPGMVWQDRDVYLQGPIWAKIPHTDGNFHPSPLMGGFGMKHPPPQILIKNTPVPADPPTAFNKDKLNSFITQYSTGQVSVEIEWELQKENSKRWNPEIQYTSNYYKSNNVEFAVNTEGVYSEPRPIGTRYLTRNL

SEQ ID NO: 2 - protein, 6 aa, synthetic construct
HDSPHK

SEQ ID NO: 3 - DNA, 18 bp, synthetic construct
  source 1..18: mol_type = other DNA
cacgacagcccacacaaa

SEQ ID NO: 4 - protein, 742 aa, synthetic construct
MAADGYLPDWLEDNLSEGIREWWALKPGAPQPKANQQHQDNARGLVLPGYKYLGPGNGLDKGEPVNAADAAALEHDKAYDQQLKAGDNPYLKYNHADAEFQERLKEDTSFGGNLGRAVFQAKKRLLEPLGLVEEAAKTAPGKKRPVEQSPQEPDSSAGIGKSGAQPAKKRLNFGQTGDTESVPDPQPIGEPPAAPSGVGSLTMASGGGAPVADNNEGADGVGSSSGNWHCDSQWLGDRVITTSTRTWALPTYNNHLYKQISNSTSGGSSNDNAYFGYSTPWGYFDFNRFHCHFSPRDWQRLINNNWGFRPKRLNFKLFNIQVKEVTDNNGVKTIANNLTSTVQVFTDSDYQLPYVLGSAHEGCLPPFPADVFMIPQYGYLTLNDGSQAVGRSSFYCLEYFPSQMLRTGNNFQFSYEFENVPFHSSYAHSQSLDRLMNPLIDQYLYYLSKTENVSGSPHSKAQNQQTLKFSVAGPSNMAVQGRNYIPGPSYRQQRVSTTVTQNNNSEFAWPGASSWALNGRNSLMNPGPAMASHKEGEDRFFPLSGSLIFGKQGTGRDNVDADKVMITNEEEIKTTNPVATESYGQVATNHQSAQAQAQTGWVQNQGILPGMVWQDRDVYLQGPIWAKIPHTDGNFHPSPLMGGFGMKHPPPQILIKNTPVPADPPTAFNKDKLNSFITQYSTGQVSVEIEWELQKENSKRWNPEIQYTSNYYKSNNVEFAVNTEGVYSEPRPIGTRYLTRNL

SEQ ID NO: 5 - DNA, 2226 bp, synthetic construct
  source 1..2226: mol_type = other DNA
atggctgccgatggttatcttccagattggctcgaggacaaccttagtgaaggaattcgcgagtggtgggctttgaaacctggagcccctcaacccaaggcaaatcaacaacatcaagacaacgctcgaggtcttgtgcttccgggttacaaataccttggacccggcaacggactcgacaagggggagccggtcaacgcagcagacgcggcggccctcgagcacgacaaggcctacgaccagcagctcaaggccggagacaacccgtacctcaagtacaaccacgccgacgccgagttccaggagcggctcaaagaagatacgtcttttgggggcaacctcgggcgagcagtcttccaggccaaaaagaggcttcttgaacctcttggtctggttgaggaagcggctaagacggctcctggaaagaagaggcctgtagagcagtctcctcaggaaccggactcctccgcgggtattggcaaatcgggtgcacagcccgctaaaaagagactcaatttcggtcagactggcgacacagagtcagtcccagaccctcaaccaatcggagaacctcccgcagccccctcaggtgtgggatctcttacaatggcttcaggtggtggcgcaccagtggcagacaataacgaaggtgccgatggagtgggtagttcctcgggaaattggcattgcgattcccaatggctgggggacagagtcatcaccaccagcacccgaacctgggccctgcccacctacaacaatcacctctacaagcaaatctccaacagcacatctggaggatcttcaaatgacaacgcctacttcggctacagcaccccctgggggtattttgacttcaacagattccactgccacttctcaccacgtgactggcagcgactcatcaacaacaactggggattccggcctaagcgactcaacttcaagctcttcaacattcaggtcaaagaggttacggacaacaatggagtcaagaccatcgccaataaccttaccagcacggtccaggtcttcacggactcagactatcagctcccgtacgtgctcgggtcggctcacgagggctgcctcccgccgttcccagcggacgttttcatgattcctcagtacgggtatctgacgcttaatgatggaagccaggccgtgggtcgttcgtccttttactgcctggaatatttcccgtcgcaaatgctaagaacgggtaacaacttccagttcagctacgagtttgagaacgtacctttccatagcagctacgctcacagccaaagcctggaccgactaatgaatccactcatcgaccaatacttgtactatctctctaagactgagaatgtgagcgggagccctcatagcaaggctcagaatcagcagactctaaaattcagtgtggccggacccagcaacatggctgtccagggaagaaactacatacctggacccagctaccgacaacaacgtgtctcaaccactgtgactcaaaacaacaacagcgaatttgcttggcctggagcttcttcttgggctctcaatggacgtaatagcttgatgaatcctggacctgctatggccagccacaaagaaggagaggaccgtttctttcctttgtctggatctttaatttttggcaaacaaggaactggaagagacaacgtggatgcggacaaagtcatgataaccaacgaagaagaaattaaaactactaacccggtagcaacggagtcctatggacaagtggccacaaaccaccagagtgcccaagcacaggcgcagaccggctgggttcaaaaccaaggaatacttccgggtatggtttggcaggacagagatgtgtacctgcaaggacccatttgggccaaaattcctcacacggacggcaactttcacccttctccgctgatgggagggtttggaatgaagcacccgcctcctcagatcctcatcaaaaacacacctgtacctgcggatcctccaacggccttcaacaaggacaagctgaactctttcatcacccagtattctactggccaagtcagcgtggagatcgagtgggagctgcagaaggaaaacagcaagcgctggaacccggagatccagtacacttccaactattacaagtctaataatgttgaatttgctgttaatactgaaggtgtatatagtgaaccccgccccattggcaccagatacctgactcgtaatctg

SEQ ID NO: 6-10 - skipped (5 entries)

SEQ ID NO: 11 - protein, 736 aa, synthetic construct
MAADGYLPDWLEDNLSEGIREWWALKPGAPQPKANQQHQDNARGLVLPGYKYLGPGNGLDKGEPVNAADAAALEHDKAYDQQLKAGDNPYLKYNHADAEFQERLKEDTSFGGNLGRAVFQAKKRLLEPLGLVEEAAKTAPGKKRPVEQSPQEPDSSAGIGKSGAQPAKKRLNFGQTGDTESVPDPQPIGEPPAAPSGVGSLTMASGGGAPVADNNEGADGVGSSSGNWHCDSQWLGDRVITTSTRTWALPTYNNHLYKQISNSTSGGSSNDNAYFGYSTPWGYFDFNRFHCHFSPRDWQRLINNNWGFRPKRLNFKLFNIQVKEVTDNNGVKTIANNLTSTVQVFTDSDYQLPYVLGSAHEGCLPPFPADVFMIPQYGYLTLNDGSQAVGRSSFYCLEYFPSQMLRTGNNFQFSYEFENVPFHSSYAHSQSLDRLMNPLIDQYLYYLSRTINGSGQNQQTLKFSVAGPSNMAVQGRNYIPGPSYRQQRVSTTVTQNNNSEFAWPGASSWALNGRNSLMNPGPAMASHKEGEDRFFPLSGSLIFGKQGTGRDNVDADKVMITNEEEIKTTNPVATESYGQVATNHQSAQAQAQTGWVQNQGILPGMVWQDRDVYLQGPIWAKIPHTDGNFHPSPLMGGFGMKHPPPQILIKNTPVPADPPTAFNKDKLNSFITQYSTGQVSVEIEWELQKENSKRWNPEIQYTSNYYKSNNVEFAVNTEGVYSEPRPIGTRYLTRNL

SEQ ID NO: 12 - DNA, 2226 bp, synthetic construct
  source 1..2226: mol_type = other DNA
atggctgccgatggttatcttccagattggctcgaggacaaccttagtgaaggaattcgcgagtggtgggctttgaaacctggagcccctcaacccaaggcaaatcaacaacatcaagacaacgctcgaggtcttgtgcttccgggttacaaataccttggacccggcaacggactcgacaagggggagccggtcaacgcagcagacgcggcggccctcgagcacgacaaggcctacgaccagcagctcaaggccggagacaacccgtacctcaagtacaaccacgccgacgccgagttccaggagcggctcaaagaagatacgtcttttgggggcaacctcgggcgagcagtcttccaggccaaaaagaggcttcttgaacctcttggtctggttgaggaagcggctaagacggctcctggaaagaagaggcctgtagagcagtctcctcaggaaccggactcctccgcgggtattggcaaatcgggtgcacagcccgctaaaaagagactcaatttcggtcagactggcgacacagagtcagtcccagaccctcaaccaatcggagaacctcccgcagccccctcaggtgtgggatctcttacaatggcttcaggtggtggcgcaccagtggcagacaataacgaaggtgccgatggagtgggtagttcctcgggaaattggcattgcgattcccaatggctgggggacagagtcatcaccaccagcacccgaacctgggccctgcccacctacaacaatcacctctacaagcaaatctccaacagcacatctggaggatcttcaaatgacaacgcctacttcggctacagcaccccctgggggtattttgacttcaacagattccactgccacttctcaccacgtgactggcagcgactcatcaacaacaactggggattccggcctaagcgactcaacttcaagctcttcaacattcaggtcaaagaggttacggacaacaatggagtcaagaccatcgccaataaccttaccagcacggtccaggtcttcacggactcagactatcagctcccgtacgtgctcgggtcggctcacgagggctgcctcccgccgttcccagcggacgttttcatgattcctcagtacgggtatctgacgcttaatgatggaagccaggccgtgggtcgttcgtccttttactgcctggaatatttcccgtcgcaaatgctaagaacgggtaacaacttccagttcagctacgagtttgagaacgtacctttccatagcagctacgctcacagccaaagcctggaccgactaatgaatccactcatcgatcagtatctgtattacttgagtaagacggagcgtgtgtctggttctccgcattctaaggcgcagaatcagcagacgttgaagttttcggtagctggtcctagcaacatggctgtccagggaagaaactacatacctggacccagctaccgacaacaacgtgtctcaaccactgtgactcaaaacaacaacagcgaatttgcttggcctggagcttcttcttgggctctcaatggacgtaatagcttgatgaatcctggacctgctatggccagccacaaagaaggagaggaccgtttctttcctttgtctggatctttaatttttggcaaacaaggaactggaagagacaacgtggatgcggacaaagtcatgataaccaacgaagaagaaattaaaactactaacccggtagcaacggagtcctatggacaagtggccacaaaccaccagagtgcccaagcacaggcgcagaccggctgggttcaaaaccaaggaatacttccgggtatggtttggcaggacagagatgtgtacctgcaaggacccatttgggccaaaattcctcacacggacggcaactttcacccttctccgctgatgggagggtttggaatgaagcacccgcctcctcagatcctcatcaaaaacacacctgtacctgcggatcctccaacggccttcaacaaggacaagctgaactctttcatcacccagtattctactggccaagtcagcgtggagatcgagtgggagctgcagaaggaaaacagcaagcgctggaacccggagatccagtacacttccaactattacaagtctaataatgttgaatttgctgttaatactgaaggtgtatatagtgaaccccgccccattggcacgcggtatttaacgaggaactta

SEQ ID NO: 13 - DNA, 2226 bp, synthetic construct
  source 1..2226: mol_type = other DNA
atggctgccgatggttatcttccagattggctcgaggacaaccttagtgaaggaattcgcgagtggtgggctttgaaacctggagcccctcaacccaaggcaaatcaacaacatcaagacaacgctcgaggtcttgtgcttccgggttacaaataccttggacccggcaacggactcgacaagggggagccggtcaacgcagcagacgcggcggccctcgagcacgacaaggcctacgaccagcagctcaaggccggagacaacccgtacctcaagtacaaccacgccgacgccgagttccaggagcggctcaaagaagatacgtcttttgggggcaacctcgggcgagcagtcttccaggccaaaaagaggcttcttgaacctcttggtctggttgaggaagcggctaagacggctcctggaaagaagaggcctgtagagcagtctcctcaggaaccggactcctccgcgggtattggcaaatcgggtgcacagcccgctaaaaagagactcaatttcggtcagactggcgacacagagtcagtcccagaccctcaaccaatcggagaacctcccgcagccccctcaggtgtgggatctcttacaatggcttcaggtggtggcgcaccagtggcagacaataacgaaggtgccgatggagtgggtagttcctcgggaaattggcattgcgattcccaatggctgggggacagagtcatcaccaccagcacccgaacctgggccctgcccacctacaacaatcacctctacaagcaaatctccaacagcacatctggaggatcttcaaatgacaacgcctacttcggctacagcaccccctgggggtattttgacttcaacagattccactgccacttctcaccacgtgactggcagcgactcatcaacaacaactggggattccggcctaagcgactcaacttcaagctcttcaacattcaggtcaaagaggttacggacaacaatggagtcaagaccatcgccaataaccttaccagcacggtccaggtcttcacggactcagactatcagctcccgtacgtgctcgggtcggctcacgagggctgcctcccgccgttcccagcggacgttttcatgattcctcagtacgggtatctgacgcttaatgatggaagccaggccgtgggtcgttcgtccttttactgcctggaatatttcccgtcgcaaatgctaagaacgggtaacaacttccagttcagctacgagtttgagaacgtacctttccatagcagctacgctcacagccaaagcctggaccgactaatgaatccactcatcgatcagtatctgtattacttgagtaaggcggagattggtcatgattctccgcataagtctggtcagaatcagcagacgttgaagttttcggtagctggtcctagcaacatggctgtccagggaagaaactacatacctggacccagctaccgacaacaacgtgtctcaaccactgtgactcaaaacaacaacagcgaatttgcttggcctggagcttcttcttgggctctcaatggacgtaatagcttgatgaatcctggacctgctatggccagccacaaagaaggagaggaccgtttctttcctttgtctggatctttaatttttggcaaacaaggaactggaagagacaacgtggatgcggacaaagtcatgataaccaacgaagaagaaattaaaactactaacccggtagcaacggagtcctatggacaagtggccacaaaccaccagagtgcccaagcacaggcgcagaccggctgggttcaaaaccaaggaatacttccgggtatggtttggcaggacagagatgtgtacctgcaaggacccatttgggccaaaattcctcacacggacggcaactttcacccttctccgctgatgggagggtttggaatgaagcacccgcctcctcagatcctcatcaaaaacacacctgtacctgcggatcctccaacggccttcaacaaggacaagctgaactctttaatcacccagtattctactggccaagtcagcgtggagatcgagtgggagctgcagaaggaaaacagcaagcgctggaacccggagatccagtacacttccaactattacaagtctaataatgttgaatttgctgttaatactgaaggtgtatatagtgaaccccgccccattggcacgcggtatttaacgaggaactta

SEQ ID NO: 14 - DNA, 2226 bp, synthetic construct
  source 1..2226: mol_type = other DNA
atggctgccgatggttatcttccagattggctcgaggacaaccttagtgaaggaattcgcgagtggtgggctttgaaacctggagcccctcaacccaaggcaaatcaacaacatcaagacaacgctcgaggtcttgtgcttccgggttacaaataccttggacccggcaacggactcgacaagggggagccggtcaacgcagcagacgcggcggccctcgagcacgacaaggcctacgaccagcagctcaaggccggagacaacccgtacctcaagtacaaccacgccgacgccgagttccaggagcggctcaaagaagatacgtcttttgggggcaacctcgggcgagcagtcttccaggccaaaaagaggcttcttgaacctcttggtctggttgaggaagcggctaagacggctcctggaaagaagaggcctgtagagcagtctcctcaggaaccggactcctccgcgggtattggcaaatcgggtgcacagcccgctaaaaagagactcaatttcggtcagactggcgacacagagtcagtcccagaccctcaaccaatcggagaacctcccgcagccccctcaggtgtgggatctcttacaatggcttcaggtggtggcgcaccagtggcagacaataacgaaggtgccgatggagtgggtagttcctcgggaaattggcattgcgattcccaatggctgggggacagagtcatcaccaccagcacccgaacctgggccctgcccacctacaacaatcacctctacaagcaaatctccaacagcacatctggaggatcttcaaatgacaacgcctacttcggctacagcaccccctgggggtattttgacttcaacagattccactgccacttctcaccacgtgactggcagcgactcatcaacaacaactggggattccggcctaagcgactcaacttcaagctcttcaacattcaggtcaaagaggttacggacaacaatggagtcaagaccatcgccaataaccttaccagcacggtccaggtcttcacggactcagactatcagctcccgtacgtgctcgggtcggctcacgagggctgcctcccgccgttcccagcggacgttttcatgattcctcagtacgggtatctgacgcttaatgatggaagccaggccgtgggtcgttcgtccttttactgcctggaatatttcccgtcgcaaatgctaagaacgggtaacaacttccagttcagctacgagtttgagaacgtacctttccatagcagctacgctcacagccaaagcctggaccgactaatgaatccactcatcgatcagtatctgtattacttgagtaagacgattattggttctggttctccgcattctaaggcgcagaatcgtcatacgttgaagttttcggtagctggtcctagcaacatggctgtccagggaagaaactacatacctggacccagctaccgacaacaacgtgtctcaaccactgtgactcaaaacaacaacagcgaatttgcttggcctggagcttcttcttgggctctcaatggacgtaatagcttgatgaatcctggacctgctatggccagccacaaagaaggagaggaccgtttctttcctttgtctggatctttaatttttggcaaacaaggaactggaagagacaacgtggatgcggacaaagtcatgataaccaacgaagaagaaattaaaactactaacccggtagcaacggagtcctatggacaagtggccacaaaccaccagagtgcccaagcacaggcgcagaccggctgggttcaaaaccaaggaatacttccgggtatggtttggcaggacagagatgtgtacctgcaaggacccatttgggccaaaattcctcacacggacggcaactttcacccttctccgctgatgggagggtttggaatgaagcacccgcctcctcagatcctcatcaaaaacacacctgtacctgcggatcctccaacggccttcaacaaggacaagctgaactctttcatcacccagtattctactggccaagtcagcgtggagatcgagtgggagctgcagaaggaaaacagcaagcgctggaacccggagatccagtacacttccaactattacaagtctaataatgttgaatttgctgttaatactgaaggtgtatatagtgaaccccgccccattggcacgcggtatttaacgaggaactta

SEQ ID NO: 15 - DNA, 2226 bp, synthetic construct
  source 1..2226: mol_type = other DNA
atggctgccgatggttatcttccagattggctcgaggacaaccttagtgaaggaattcgcgagtggtgggctttgaaacctggagcccctcaacccaaggcaaatcaacaacatcaagacaacgctcgaggtcttgtgcttccgggttacaaataccttggacccggcaacggactcgacaagggggagccggtcaacgcagcagacgcggcggccctcgagcacgacaaggcctacgaccagcagctcaaggccggagacaacccgtacctcaagtacaaccacgccgacgccgagttccaggagcggctcaaagaagatacgtcttttgggggcaacctcgggcgagcagtcttccaggccaaaaagaggcttcttgaacctcttggtctggttgaggaagcggctaagacggctcctggaaagaagaggcctgtagagcagtctcctcaggaaccggactcctccgcgggtattggcaaatcgggtgcacagcccgctaaaaagagactcaatttcggtcagactggcgacacagagtcagtcccagaccctcaaccaatcggagaacctcccgcagccccctcaggtgtgggatctcttacaatggcttcaggtggtggcgcaccagtggcagacaataacgaaggtgccgatggagtgggtagttcctcgggaaattggcattgcgattcccaatggctgggggacagagtcatcaccaccagcacccgaacctgggccctgcccacctacaacaatcacctctacaagcaaatctccaacagcacatctggaggatcttcaaatgacaacgcctacttcggctacagcaccccctgggggtattttgacttcaacagattccactgccacttctcaccacgtgactggcagcgactcatcaacaacaactggggattccggcctaagcgactcaacttcaagctcttcaacattcaggtcaaagaggttacggacaacaatggagtcaagaccatcgccaataaccttaccagcacggtccaggtcttcacggactcagactatcagctcccgtacgtgctcgggtcggctcacgagggctgcctcccgccgttcccagcggacgttttcatgattcctcagtacgggtatctgacgcttaatgatggaagccaggccgtgggtcgttcgtccttttactgcctggaatatttcccgtcgcaaatgctaagaacgggtaacaacttccagttcagctacgagtttgagaacgtacctttccatagcagctacgctcacagccaaagcctggaccgactaatgaatccactcatcgatcagtatctgtattacttgagtaagacggagaagatgtctggttctccgcattctaaggcgcagaatcagcagacgttgaagttttcggtagctggtcctagcaacatggctgtccagggaagaaactacatacctggacccagctaccgacaacaacgtgtctcaaccactgtgactcaaaacaacaacagcgaatttgcttggcctggagcttcttcttgggctctcaatggacgtaatagcttgatgaatcctggacctgctatggccagccacaaagaaggagaggaccgtttctttcctttgtctggatctttaatttttggcaaacaaggaactggaagagacaacgtggatgcggacaaagtcatgataaccaacgaagaagaaattaaaactactaacccggtagcaacggagtcctatggacaagtggccacaaaccaccagagtgcccaagcacaggcgcagaccggctgggttcaaaaccaaggaatacttccgggtatggtttggcaggacagagatgtgtacctgcaaggacccatttgggccaaaattcctcacacggacggcaactttcacccttctccgctgatgggagggtttggaatgaagcacccgcctcctcagatcctcatcaaaaacacacctgtacctgcggatcctccaacggccttcaacaaggacaagctgaactctttcatcacccagtattctactggccaagtcagcgtggagatcgagtgggagctgcagaaggaaaacagcaagcgctggaacccggagatccagtacacttccaactattacaagtctaataatgttgaatttgctgttaatactgaaggtgtatatagtgaaccccgccccattggcacgcggtatttaacgaggaactta

SEQ ID NO: 16 - DNA, 2226 bp, synthetic construct
  source 1..2226: mol_type = other DNA
atggctgccgatggttatcttccagattggctcgaggacaaccttagtgaaggaattcgcgagtggtgggctttgaaacctggagcccctcaacccaaggcaaatcaacaacatcaagacaacgctcgaggtcttgtgcttccgggttacaaataccttggacccggcaacggactcgacaagggggagccggtcaacgcagcagacgcggcggccctcgagcacgacaaggcctacgaccagcagctcaaggccggagacaacccgtacctcaagtacaaccacgccgacgccgagttccaggagcggctcaaagaagatacgtcttttgggggcaacctcgggcgagcagtcttccaggccaaaaagaggcttcttgaacctcttggtctggttgaggaagcggctaagacggctcctggaaagaagaggcctgtagagcagtctcctcaggaaccggactcctccgcgggtattggcaaatcgggtgcacagcccgctaaaaagagactcaatttcggtcagactggcgacacagagtcagtcccagaccctcaaccaatcggagaacctcccgcagccccctcaggtgtgggatctcttacaatggcttcaggtggtggcgcaccagtggcagacaataacgaaggtgccgatggagtgggtagttcctcgggaaattggcattgcgattcccaatggctgggggacagagtcatcaccaccagcacccgaacctgggccctgcccacctacaacaatcacctctacaagcaaatctccaacagcacatctggaggatcttcaaatgacaacgcctacttcggctacagcaccccctgggggtattttgacttcaacagattccactgccacttctcaccacgtgactggcagcgactcatcaacaacaactggggattccggcctaagcgactcaacttcaagctcttcaacattcaggtcaaagaggttacggacaacaatggagtcaagaccatcgccaataaccttaccagcacggtccaggtcttcacggactcagactatcagctcccgtacgtgctcgggtcggctcacgagggctgcctcccgccgttcccagcggacgttttcatgattcctcagtacgggtatctgacgcttaatgatggaagccaggccgtgggtcgttcgtccttttactgcctggaatatttcccgtcgcaaatgctaagaacgggtaacaacttccagttcagctacgagtttgagaacgtacctttccatagcagctacgctcacagccaaagcctggaccgactaatgaatccactcatcgatcagtatctgtattacttgagtaaggagattaatggtcgtggttctccgcattctaaggcgcagaatcagcagacgttgaagttttcggtagctggtcctagcaacatggctgtccagggaagaaactacatacctggacccagctaccgacaacaacgtgtctcaaccactgtgactcaaaacaacaacagcgaatttgcttggcctggagcttcttcttgggctctcaatggacgtaatagcttgatgaatcctggacctgctatggccagccacaaagaaggagaggaccgtttctttcctttgtctggatctttaatttttggcaaacaaggaactggaagagacaacgtggatgcggacaaagtcatgataaccaacgaagaagaaattaaaactactaacccggtagcaacggagtcctatggacaagtggccacaaaccaccagagtgcccaagcacaggcgcagaccggctgggttcaaaaccaaggaatacttccgggtatggtttggcaggacagagatgtgtacctgcaaggacccatttgggccaaaattcctcacacggacggcaactttcacccttctccgctgatgggagggtttggaatgaagcacccgcctcctcagatcctcatcaaaaacacacctgtacctgcggatcctccaacggccttcaacaaggacaagctgaactctttcatcacccagtattctactggccaagtcagcgtggagatcgagtgggagctgcagaaggaaaacagcaagcgctggaacccggagatccagtacacttccaactattacaagtctaataatgttgaatttgctgttaatactgaaggtgtatatagtgaaccccgccccattggcacgcggtatttaacgaggaactta

SEQ ID NO: 17 - DNA, 2226 bp, synthetic construct
  source 1..2226: mol_type = other DNA
atggctgccgatggttatcttccagattggctcgaggacaaccttagtgaaggaattcgcgagtggtgggctttgaaacctggagcccctcaacccaaggcaaatcaacaacatcaagacaacgctcgaggtcttgtgcttccgggttacaaataccttggacccggcaacggactcgacaagggggagccggtcaacgcagcagacgcggcggccctcgagcacgacaaggcctacgaccagcagctcaaggccggagacaacccgtacctcaagtacaaccacgccgacgccgagttccaggagcggctcaaagaagatacgtcttttgggggcaacctcgggcgagcagtcttccaggccaaaaagaggcttcttgaacctcttggtctggttgaggaagcggctaagacggctcctggaaagaagaggcctgtagagcagtctcctcaggaaccggactcctccgcgggtattggcaaatcgggtgcacagcccgctaaaaagagactcaatttcggtcagactggcgacacagagtcagtcccagaccctcaaccaatcggagaacctcccgcagccccctcaggtgtgggatctcttacaatggcttcaggtggtggcgcaccagtggcagacaataacgaaggtgccgatggagtgggtagttcctcgggaaattggcattgcgattcccaatggctgggggacagagtcatcaccaccagcacccgaacctgggccctgcccacctacaacaatcacctctacaagcaaatctccaacagcacatctggaggatcttcaaatgacaacgcctacttcggctacagcaccccctgggggtattttgacttcaacagattccactgccacttctcaccacgtgactggcagcgactcatcaacaacaactggggattccggcctaagcgactcaacttcaagctcttcaacattcaggtcaaagaggttacggacaacaatggagtcaagaccatcgccaataaccttaccagcacggtccaggtcttcacggactcagactatcagctcccgtacgtgctcgggtcggctcacgagggctgcctcccgccgttcccagcggacgttttcatgattcctcagtacgggtatctgacgcttaatgatggaagccaggccgtgggtcgttcgtccttttactgcctggaatatttcccgtcgcaaatgctaagaacgggtaacaacttccagttcagctacgagtttgagaacgtacctttccatagcagctacgctcacagccaaagcctggaccgactaatgaatccactcatcgatcagtatctgtattacttgagtaagacgtttaatggttctggttctccgcattctaaggcgccgaatctgcagacgttgaagttttcggtagctggtcctagcaacatggctgtccagggaagaaactacatacctggacccagctaccgacaacaacgtgtctcaaccactgtgactcaaaacaacaacagcgaatttgcttggcctggagcttcttcttgggctctcaatggacgtaatagcttgatgaatcctggacctgctatggccagccacaaagaaggagaggaccgtttctttcctttgtctggatctttaatttttggcaaacaaggaactggaagagacaacgtggatgcggacaaagtcatgataaccaacgaagaagaaattaaaactactaacccggtagcaacggagtcctatggacaagtggccacaaaccaccagagtgcccaagcacaggcgcagaccggctgggttcaaaaccaaggaatacttccgggtatggtttggcaggacagagatgtgtacctgcaaggacccatttgggccaaaattcctcacacggacggcaactttcacccttctccgctgatgggagggtttggaatgaagcacccgcctcctcagatcctcatcaaaaacacacctgtacctgcggatcctccaacggccttcaacaaggacaagctgaactctttcatcacccagtattctactggccaagtcagcgtggagatcgagtgggagctgcagaaggaaaacagcaagcgctggaacccggagatccagtacacttccaactattacaagtctaataatgttgaatttgctgttaatactgaaggtgtatatagtgaaccccgccccattggcacgcggtatttaacgaggaactta

SEQ ID NO: 18 - DNA, 2226 bp, synthetic construct
  source 1..2226: mol_type = other DNA
atggctgccgatggttatcttccagattggctcgaggacaaccttagtgaaggaattcgcgagtggtgggctttgaaacctggagcccctcaacccaaggcaaatcaacaacatcaagacaacgctcgaggtcttgtgcttccgggttacaaataccttggacccggcaacggactcgacaagggggagccggtcaacgcagcagacgcggcggccctcgagcacgacaaggcctacgaccagcagctcaaggccggagacaacccgtacctcaagtacaaccacgccgacgccgagttccaggagcggctcaaagaagatacgtcttttgggggcaacctcgggcgagcagtcttccaggccaaaaagaggcttcttgaacctcttggtctggttgaggaagcggctaagacggctcctggaaagaagaggcctgtagagcagtctcctcaggaaccggactcctccgcgggtattggcaaatcgggtgcacagcccgctaaaaagagactcaatttcggtcagactggcgacacagagtcagtcccagaccctcaaccaatcggagaacctcccgcagccccctcaggtgtgggatctcttacaatggcttcaggtggtggcgcaccagtggcagacaataacgaaggtgccgatggagtgggtagttcctcgggaaattggcattgcgattcccaatggctgggggacagagtcatcaccaccagcacccgaacctgggccctgcccacctacaacaatcacctctacaagcaaatctccaacagcacatctggaggatcttcaaatgacaacgcctacttcggctacagcaccccctgggggtattttgacttcaacagattccactgccacttctcaccacgtgactggcagcgactcatcaacaacaactggggattccggcctaagcgactcaacttcaagctcttcaacattcaggtcaaagaggttacggacaacaatggagtcaagaccatcgccaataaccttaccagcacggtccaggtcttcacggactcagactatcagctcccgtacgtgctcgggtcggctcacgagggctgcctcccgccgttcccagcggacgttttcatgattcctcagtacgggtatctgacgcttaatgatggaagccaggccgtgggtcgttcgtccttttactgcctggaatatttcccgtcgcaaatgctaagaacgggtaacaacttccagttcagctacgagtttgagaacgtacctttccatagcagctacgctcacagccaaagcctggaccgactaatgaatccactcatcgatcagtatctgtattacttgagtaagacggagaagacgtctggttctccgcattctaaggcgcagaatcagcagacgttgaagttttcggtagctggtcctagcaacatggctgtccagggaagaaactacatacctggacccagctaccgacaacaacgtgtctcaaccactgtgactcaaaacaacaacagcgaatttgcttggcctggagcttcttcttgggctctcaatggacgtaatagcttgatgaatcctggacctgctatggccagccacaaagaaggagaggaccgtttctttcctttgtctggatctttaatttttggcaaacaaggaactggaagagacaacgtggatgcggacaaagtcatgataaccaacgaagaagaaattaaaactactaacccggtagcaacggagtcctatggacaagtggccacaaaccaccagagtgcccaagcacaggcgcagaccggctgggttcaaaaccaaggaatacttccgggtatggtttggcaggacagagatgtgtacctgcaaggacccatttgggccaaaattcctcacacggacggcaactttcacccttctccgctgatgggagggtttggaatgaagcacccgcctcctcagatcctcatcaaaaacacacctgtacctgcggatcctccaacggccttcaacaaggacaagctgaactctttcatcacccagtattctactggccaagtcagcgtggagatcgagtgggagctgcagaaggaaaacagcaagcgctggaacccggagatccagtacacttccaactattacaagtctaataatgttgaatttgctgttaatactgaaggtgtatatagtgaaccccgccccattggcacgcggtatttaacgaggaactta

SEQ ID NO: 19 - DNA, 2226 bp, synthetic construct
  source 1..2226: mol_type = other DNA
atggctgccgatggttatcttccagattggctcgaggacaaccttagtgaaggaattcgcgagtggtgggctttgaaacctggagcccctcaacccaaggcaaatcaacaacatcaagacaacgctcgaggtcttgtgcttccgggttacaaataccttggacccggcaacggactcgacaagggggagccggtcaacgcagcagacgcggcggccctcgagcacgacaaggcctacgaccagcagctcaaggccggagacaacccgtacctcaagtacaaccacgccgacgccgagttccaggagcggctcaaagaagatacgtcttttgggggcaacctcgggcgagcagtcttccaggccaaaaagaggcttcttgaacctcttggtctggttgaggaagcggctaagacggctcctggaaagaagaggcctgtagagcagtctcctcaggaaccggactcctccgcgggtattggcaaatcgggtgcacagcccgctaaaaagagactcaatttcggtcagactggcgacacagagtcagtcccagaccctcaaccaatcggagaacctcccgcagccccctcaggtgtgggatctcttacaatggcttcaggtggtggcgcaccagtggcagacaataacgaaggtgccgatggagtgggtagttcctcgggaaattggcattgcgattcccaatggctgggggacagagtcatcaccaccagcacccgaacctgggccctgcccacctacaacaatcacctctacaagcaaatctccaacagcacatctggaggatcttcaaatgacaacgcctacttcggctacagcaccccctgggggtattttgacttcaacagattccactgccacttctcaccacgtgactggcagcgactcatcaacaacaactggggattccggcctaagcgactcaacttcaagctcttcaacattcaggtcaaagaggttacggacaacaatggagtcaagaccatcgccaataaccttaccagcacggtccaggtcttcacggactcagactatcagctcccgtacgtgctcgggtcggctcacgagggctgcctcccgccgttcccagcggacgttttcatgattcctcagtacgggtatctgacgcttaatgatggaagccaggccgtgggtcgttcgtccttttactgcctggaatatttcccgtcgcaaatgctaagaacgggtaacaacttccagttcagctacgagtttgagaacgtacctttccatagcagctacgctcacagccaaagcctggaccgactaatgaatccactcatcgatcagtatctgtattacttgagtaagacgatgaatggtcatgattctccgcattctaaggcgcagaatcagcagacgttgaagttttcggtagctggtcctagcaacatggctgtccagggaagaaactacatacctggacccagctaccgacaacaacgtgtctcaaccactgtgactcaaaacaacaacagcgaatttgcttggcctggagcttcttcttgggctctcaatggacgtaatagcttgatgaatcctggacctgctatggccagccacaaagaaggagaggaccgtttctttcctttgtctggatctttaatttttggcaaacaaggaactggaagagacaacgtggatgcggacaaagtcatgataaccaacgaagaagaaattaaaactactaacccggtagcaacggagtcctatggacaagtggccacaaaccaccagagtgcccaagcacaggcgcagaccggctgggttcaaaaccaaggaatacttccgggtatggtttggcaggacagagatgtgtacctgcaaggacccatttgggccaaaattcctcacacggacggcaactttcacccttctccgctgatgggagggtttggaatgaagcacccgcctcctcagatcctcatcaaaaacacacctgtacctgcggatcctccaacggccttcaacaaggacaagctgaactctttcatcacccagtattctactggccaagtcagcgtggagatcgagtgggagctgcagaaggaaaacagcaagcgctggaacccggagatccagtacacttccaactattacaagtctaataatgttgaatttgctgttaatactgaaggtgtatatagtgaaccccgccccattggcacgcggtatttaacgaggaactta

SEQ ID NO: 20 - DNA, 2226 bp, synthetic construct
  source 1..2226: mol_type = other DNA
atggctgccgatggttatcttccagattggctcgaggacaaccttagtgaaggaattcgcgagtggtgggctttgaaacctggagcccctcaacccaaggcaaatcaacaacatcaagacaacgctcgaggtcttgtgcttccgggttacaaataccttggacccggcaacggactcgacaagggggagccggtcaacgcagcagacgcggcggccctcgagcacgacaaggcctacgaccagcagctcaaggccggagacaacccgtacctcaagtacaaccacgccgacgccgagttccaggagcggctcaaagaagatacgtcttttgggggcaacctcgggcgagcagtcttccaggccaaaaagaggcttcttgaacctcttggtctggttgaggaagcggctaagacggctcctggaaagaagaggcctgtagagcagtctcctcaggaaccggactcctccgcgggtattggcaaatcgggtgcacagcccgctaaaaagagactcaatttcggtcagactggcgacacagagtcagtcccagaccctcaaccaatcggagaacctcccgcagccccctcaggtgtgggatctcttacaatggcttcaggtggtggcgcaccagtggcagacaataacgaaggtgccgatggagtgggtagttcctcgggaaattggcattgcgattcccaatggctgggggacagagtcatcaccaccagcacccgaacctgggccctgcccacctacaacaatcacctctacaagcaaatctccaacagcacatctggaggatcttcaaatgacaacgcctacttcggctacagcaccccctgggggtattttgacttcaacagattccactgccacttctcaccacgtgactggcagcgactcatcaacaacaactggggattccggcctaagcgactcaacttcaagctcttcaacattcaggtcaaagaggttacggacaacaatggagtcaagaccatcgccaataaccttaccagcacggtccaggtcttcacggactcagactatcagctcccgtacgtgctcgggtcggctcacgagggctgcctcccgccgttcccagcggacgttttcatgattcctcagtacgggtatctgacgcttaatgatggaagccaggccgtgggtcgttcgtccttttactgcctggaatatttcccgtcgcaaatgctaagaacgggtaacaacttccagttcagctacgagtttgagaacgtacctttccatagcagctacgctcacagccaaagcctggaccgactaatgaatccactcatcgatcagtatctgtattacttgagtaagacgattgatggtcatgattctccgcattctaaggcgcagaatcagcagacgttgaagttttcggtagctggtcctagcaacatggctgtccagggaagaaactacatacctggacccagctaccgacaacaacgtgtctcaaccactgtgactcaaaacaacaacagcgaatttgcttggcctggagcttcttcttgggctctcaatggacgtaatagcttgatgaatcctggacctgctatggccagccacaaagaaggagaggaccgtttctttcctttgtctggatctttaatttttggcaaacaaggaactggaagagacaacgtggatgcggacaaagtcatgataaccaacgaagaagaaattaaaactactaacccggtagcaacggagtcctatggacaagtggccacaaaccaccagagtgcccaagcacaggcgcagaccggctgggttcaaaaccaaggaatacttccgggtatggtttggcaggacagagatgtgtacctgcaaggacccatttgggccaaaattcctcacacggacggcaactttcacccttctccgctgatgggagggtttggaatgaagcacccgcctcctcagatcctcatcaaaaacacacctgtacctgcggatcctccaacggccttcaacaaggacaagctgaactctttcatcacccagtattctactggccaagtcagcgtggagatcgagtgggagctgcagaaggaaaacagcaagcgctggaacccggagatccagtacacttccaactattacaagtctaataatgttgaatttgctgttaatactgaaggtgtatatagtgaaccccgccccattggcacgcggtatttaacgaggaactta

SEQ ID NO: 21 - DNA, 2226 bp, synthetic construct
  source 1..2226: mol_type = other DNA
atggctgccgatggttatcttccagattggctcgaggacaaccttagtgaaggaattcgcgagtggtgggctttgaaacctggagcccctcaacccaaggcaaatcaacaacatcaagacaacgctcgaggtcttgtgcttccgggttacaaataccttggacccggcaacggactcgacaagggggagccggtcaacgcagcagacgcggcggccctcgagcacgacaaggcctacgaccagcagctcaaggccggagacaacccgtacctcaagtacaaccacgccgacgccgagttccaggagcggctcaaagaagatacgtcttttgggggcaacctcgggcgagcagtcttccaggccaaaaagaggcttcttgaacctcttggtctggttgaggaagcggctaagacggctcctggaaagaagaggcctgtagagcagtctcctcaggaaccggactcctccgcgggtattggcaaatcgggtgcacagcccgctaaaaagagactcaatttcggtcagactggcgacacagagtcagtcccagaccctcaaccaatcggagaacctcccgcagccccctcaggtgtgggatctcttacaatggcttcaggtggtggcgcaccagtggcagacaataacgaaggtgccgatggagtgggtagttcctcgggaaattggcattgcgattcccaatggctgggggacagagtcatcaccaccagcacccgaacctgggccctgcccacctacaacaatcacctctacaagcaaatctccaacagcacatctggaggatcttcaaatgacaacgcctacttcggctacagcaccccctgggggtattttgacttcaacagattccactgccacttctcaccacgtgactggcagcgactcatcaacaacaactggggattccggcctaagcgactcaacttcaagctcttcaacattcaggtcaaagaggttacggacaacaatggagtcaagaccatcgccaataaccttaccagcacggtccaggtcttcacggactcagactatcagctcccgtacgtgctcgggtcggctcacgagggctgcctcccgccgttcccagcggacgttttcatgattcctcagtacgggtatctgacgcttaatgatggaagccaggccgtgggtcgttcgtccttttactgcctggaatatttcccgtcgcaaatgctaagaacgggtaacaacttccagttcagctacgagtttgagaacgtacctttccatagcagctacgctcacagccaaagcctggaccgactaatgaatccactcatcgatcagtatctgtattacttgagtaagacgaataatggtcatgattctccgcattctaaggcgcagaatcagcagacgttgaagttttcggtagctggtcctagcaacatggctgtccagggaagaaactacatacctggacccagctaccgacaacaacgtgtctcaaccactgtgactcaaaacaacaacagcgaatttgcttggcctggagcttcttcttgggctctcaatggacgtaatagcttgatgaatcctggacctgctatggccagccacaaagaaggagaggaccgtttctttcctttgtctggatctttaatttttggcaaacaaggaactggaagagacaacgtggatgcggacaaagtcatgataaccaacgaagaagaaattaaaactactaacccggtagcaacggagtcctatggacaagtggccacaaaccaccagagtgcccaagcacaggcgcagaccggctgggttcaaaaccaaggaatacttccgggtatggtttggcaggacagagatgtgtacctgcaaggacccatttgggccaaaattcctcacacggacggcaactttcacccttctccgctgatgggagggtttggaatgaagcacccgcctcctcagatcctcatcaaaaacacacctgtacctgcggatcctccaacggccttcaacaaggacaagctgaactctttcatcacccagtattctactggccaagtcagcgtggagatcgagtgggagctgcagaaggaaaacagcaagcgctggaacccggagatccagtacacttccaactattacaagtctaataatgttgaatttgctgttaatactgaaggtgtatatagtgaaccccgccccattggcacgcggtatttaacgaggaactta

SEQ ID NO: 22 - DNA, 2226 bp, synthetic construct
  source 1..2226: mol_type = other DNA
atggctgccgatggttatcttccagattggctcgaggacaaccttagtgaaggaattcgcgagtggtgggctttgaaacctggagcccctcaacccaaggcaaatcaacaacatcaagacaacgctcgaggtcttgtgcttccgggttacaaataccttggacccggcaacggactcgacaagggggagccggtcaacgcagcagacgcggcggccctcgagcacgacaaggcctacgaccagcagctcaaggccggagacaacccgtacctcaagtacaaccacgccgacgccgagttccaggagcggctcaaagaagatacgtcttttgggggcaacctcgggcgagcagtcttccaggccaaaaagaggcttcttgaacctcttggtctggttgaggaagcggctaagacggctcctggaaagaagaggcctgtagagcagtctcctcaggaaccggactcctccgcgggtattggcaaatcgggtgcacagcccgctaaaaagagactcaatttcggtcagactggcgacacagagtcagtcccagaccctcaaccaatcggagaacctcccgcagccccctcaggtgtgggatctcttacaatggcttcaggtggtggcgcaccagtggcagacaataacgaaggtgccgatggagtgggtagttcctcgggaaattggcattgcgattcccaatggctgggggacagagtcatcaccaccagcacccgaacctgggccctgcccacctacaacaatcacctctacaagcaaatctccaacagcacatctggaggatcttcaaatgacaacgcctacttcggctacagcaccccctgggggtattttgacttcaacagattccactgccacttctcaccacgtgactggcagcgactcatcaacaacaactggggattccggcctaagcgactcaacttcaagctcttcaacattcaggtcaaagaggttacggacaacaatggagtcaagaccatcgccaataaccttaccagcacggtccaggtcttcacggactcagactatcagctcccgtacgtgctcgggtcggctcacgagggctgcctcccgccgttcccagcggacgttttcatgattcctcagtacgggtatctgacgcttaatgatggaagccaggccgtgggtcgttcgtccttttactgcctggaatatttcccgtcgcaaatgctaagaacgggtaacaacttccagttcagctacgagtttgagaacgtacctttccatagcagctacgctcacagccaaagcctggaccgactaatgaatccactcatcgatcagtatctgtattacttgagtaagacgcagcgtaagtctggttctccgcattctaaggcgcagaatcagcagacgttgaagttttcggtagctggtcctagcaacatggctgtccagggaagaaactacatacctggacccagctaccgacaacaacgtgtctcaaccactgtgactcaaaacaacaacagcgaatttgcttggcctggagcttcttcttgggctctcaatggacgtaatagcttgatgaatcctggacctgctatggccagccacaaagaaggagaggaccgtttctttcctttgtctggatctttaatttttggcaaacaaggaactggaagagacaacgtggatgcggacaaagtcatgataaccaacgaagaagaaattaaaactactaacccggtagcaacggagtcctatggacaagtggccacaaaccaccagagtgcccaagcacaggcgcagaccggctgggttcaaaaccaaggaatacttccgggtatggtttggcaggacagagatgtgtacctgcaaggacccatttgggccaaaattcctcacacggacggcaactttcacccttctccgctgatgggagggtttggaatgaagcacccgcctcctcagatcctcatcaaaaacacacctgtacctgcggatcctccaacggccttcaacaaggacaagctgaactctttcatcacccagtattctactggccaagtcagcgtggagatcgagtgggagctgcagaaggaaaacagcaagcgctggaacccggagatccagtacacttccaactattacaagtctaataatgttgaatttgctgttaatactgaaggtgtatatagtgaaccccgccccattggcacgcggtatttaacgaggaactta

SEQ ID NO: 23 - DNA, 2226 bp, synthetic construct
  source 1..2226: mol_type = other DNA
atggctgccgatggttatcttccagattggctcgaggacaaccttagtgaaggaattcgcgagtggtgggctttgaaacctggagcccctcaacccaaggcaaatcaacaacatcaagacaacgctcgaggtcttgtgcttccgggttacaaataccttggacccggcaacggactcgacaagggggagccggtcaacgcagcagacgcggcggccctcgagcacgacaaggcctacgaccagcagctcaaggccggagacaacccgtacctcaagtacaaccacgccgacgccgagttccaggagcggctcaaagaagatacgtcttttgggggcaacctcgggcgagcagtcttccaggccaaaaagaggcttcttgaacctcttggtctggttgaggaagcggctaagacggctcctggaaagaagaggcctgtagagcagtctcctcaggaaccggactcctccgcgggtattggcaaatcgggtgcacagcccgctaaaaagagactcaatttcggtcagactggcgacacagagtcagtcccagaccctcaaccaatcggagaacctcccgcagccccctcaggtgtgggatctcttacaatggcttcaggtggtggcgcaccagtggcagacaataacgaaggtgccgatggagtgggtagttcctcgggaaattggcattgcgattcccaatggctgggggacagagtcatcaccaccagcacccgaacctgggccctgcccacctacaacaatcacctctacaagcaaatctccaacagcacatctggaggatcttcaaatgacaacgcctacttcggctacagcaccccctgggggtattttgacttcaacagattccactgccacttctcaccacgtgactggcagcgactcatcaacaacaactggggattccggcctaagcgactcaacttcaagctcttcaacattcaggtcaaagaggttacggacaacaatggagtcaagaccatcgccaataaccttaccagcacggtccaggtcttcacggactcagactatcagctcccgtacgtgctcgggtcggctcacgagggctgcctcccgccgttcccagcggacgttttcatgattcctcagtacgggtatctgacgcttaatgatggaagccaggccgtgggtcgttcgtccttttactgcctggaatatttcccgtcgcaaatgctaagaacgggtaacaacttccagttcagctacgagtttgagaacgtacctttccatagcagctacgctcacagccaaagcctggaccgactaatgaatccactcatcgatcagtatctgtattacttgagtaagacgattaatggttctggttctccgcattctaaggcgcaggcgcgtaagacgttgaagttttcggtagctggtcctagcaacatggctgtccagggaagaaactacatacctggacccagctaccgacaacaacgtgtctcaaccactgtgactcaaaacaacaacagcgaatttgcttggcctggagcttcttcttgggctctcaatggacgtaatagcttgatgaatcctggacctgctatggccagccacaaagaaggagaggaccgtttctttcctttgtctggatctttaatttttggcaaacaaggaactggaagagacaacgtggatgcggacaaagtcatgataaccaacgaagaagaaattaaaactactaacccggtagcaacggagtcctatggacaagtggccacaaaccaccagagtgcccaagcacaggcgcagaccggctgggttcaaaaccaaggaatacttccgggtatggtttggcaggacagagatgtgtacctgcaaggacccatttgggccaaaattcctcacacggacggcaactttcacccttctccgctgatgggagggtttggaatgaagcacccgcctcctcagatcctcatcaaaaacacacctgtacctgcggatcctccaacggccttcaacaaggacaagctgaactctttcatcacccagtattctactggccaagtcagcgtggagatcgagtgggagctgcagaaggaaaacagcaagcgctggaacccggagatccagtacacttccaactattacaagtctaataatgttgaatttgctgttaatactgaaggtgtatatagtgaaccccgccccattggcacgcggtatttaacgaggaactta

SEQ ID NO: 24 - DNA, 2226 bp, synthetic construct
  source 1..2226: mol_type = other DNA
atggctgccgatggttatcttccagattggctcgaggacaaccttagtgaaggaattcgcgagtggtgggctttgaaacctggagcccctcaacccaaggcaaatcaacaacatcaagacaacgctcgaggtcttgtgcttccgggttacaaataccttggacccggcaacggactcgacaagggggagccggtcaacgcagcagacgcggcggccctcgagcacgacaaggcctacgaccagcagctcaaggccggagacaacccgtacctcaagtacaaccacgccgacgccgagttccaggagcggctcaaagaagatacgtcttttgggggcaacctcgggcgagcagtcttccaggccaaaaagaggcttcttgaacctcttggtctggttgaggaagcggctaagacggctcctggaaagaagaggcctgtagagcagtctcctcaggaaccggactcctccgcgggtattggcaaatcgggtgcacagcccgctaaaaagagactcaatttcggtcagactggcgacacagagtcagtcccagaccctcaaccaatcggagaacctcccgcagccccctcaggtgtgggatctcttacaatggcttcaggtggtggcgcaccagtggcagacaataacgaaggtgccgatggagtgggtagttcctcgggaaattggcattgcgattcccaatggctgggggacagagtcatcaccaccagcacccgaacctgggccctgcccacctacaacaatcacctctacaagcaaatctccaacagcacatctggaggatcttcaaatgacaacgcctacttcggctacagcaccccctgggggtattttgacttcaacagattccactgccacttctcaccacgtgactggcagcgactcatcaacaacaactggggattccggcctaagcgactcaacttcaagctcttcaacattcaggtcaaagaggttacggacaacaatggagtcaagaccatcgccaataaccttaccagcacggtccaggtcttcacggactcagactatcagctcccgtacgtgctcgggtcggctcacgagggctgcctcccgccgttcccagcggacgttttcatgattcctcagtacgggtatctgacgcttaatgatggaagccaggccgtgggtcgttcgtccttttactgcctggaatatttcccgtcgcaaatgctaagaacgggtaacaacttccagttcagctacgagtttgagaacgtacctttccatagcagctacgctcacagccaaagcctggaccgactaatgaatccactcatcgatcagtatctgtattacttgagtaagtatattgtgggttctggttctccgcattctaaggcgcagaatcagcagacgttgaagttttcggtagctggtcctagcaacatggctgtccagggaagaaactacatacctggacccagctaccgacaacaacgtgtctcaaccactgtgactcaaaacaacaacagcgaatttgcttggcctggagcttcttcttgggctctcaatggacgtaatagcttgatgaatcctggacctgctatggccagccacaaagaaggagaggaccgtttctttcctttgtctggatctttaatttttggcaaacaaggaactggaagagacaacgtggatgcggacaaagtcatgataaccaacgaagaagaaattaaaactactaacccggtagcaacggagtcctatggacaagtggccacaaaccaccagagtgcccaagcacaggcgcagaccggctgggttcaaaaccaaggaatacttccgggtatggtttggcaggacagagatgtgtacctgcaaggacccatttgggccaaaattcctcacacggacggcaactttcacccttctccgctgatgggagggtttggaatgaagcacccgcctcctcagatcctcatcaaaaacacacctgtacctgcggatcctccaacggccttcaacaaggacaagctgaactctttcatcacccagtattctactggccaagtcagcgtggagatcgagtgggagctgcagaaggaaaacagcaagcgctggaacccggagatccagtacacttccaactattacaagtctaataatgttgaatttgctgttaatactgaaggtgtatatagtgaaccccgccccattggcacgcggtatttaacgaggaactta

SEQ ID NO: 25 - DNA, 2226 bp, synthetic construct
  source 1..2226: mol_type = other DNA
atggctgccgatggttatcttccagattggctcgaggacaaccttagtgaaggaattcgcgagtggtgggctttgaaacctggagcccctcaacccaaggcaaatcaacaacatcaagacaacgctcgaggtcttgtgcttccgggttacaaataccttggacccggcaacggactcgacaagggggagccggtcaacgcagcagacgcggcggccctcgagcacgacaaggcctacgaccagcagctcaaggccggagacaacccgtacctcaagtacaaccacgccgacgccgagttccaggagcggctcaaagaagatacgtcttttgggggcaacctcgggcgagcagtcttccaggccaaaaagaggcttcttgaacctcttggtctggttgaggaagcggctaagacggctcctggaaagaagaggcctgtagagcagtctcctcaggaaccggactcctccgcgggtattggcaaatcgggtgcacagcccgctaaaaagagactcaatttcggtcagactggcgacacagagtcagtcccagaccctcaaccaatcggagaacctcccgcagccccctcaggtgtgggatctcttacaatggcttcaggtggtggcgcaccagtggcagacaataacgaaggtgccgatggagtgggtagttcctcgggaaattggcattgcgattcccaatggctgggggacagagtcatcaccaccagcacccgaacctgggccctgcccacctacaacaatcacctctacaagcaaatctccaacagcacatctggaggatcttcaaatgacaacgcctacttcggctacagcaccccctgggggtattttgacttcaacagattccactgccacttctcaccacgtgactggcagcgactcatcaacaacaactggggattccggcctaagcgactcaacttcaagctcttcaacattcaggtcaaagaggttacggacaacaatggagtcaagaccatcgccaataaccttaccagcacggtccaggtcttcacggactcagactatcagctcccgtacgtgctcgggtcggctcacgagggctgcctcccgccgttcccagcggacgttttcatgattcctcagtacgggtatctgacgcttaatgatggaagccaggccgtgggtcgttcgtccttttactgcctggaatatttcccgtcgcaaatgctaagaacgggtaacaacttccagttcagctacgagtttgagaacgtacctttccatagcagctacgctcacagccaaagcctggaccgactaatgaatccactcatcgatcagtatctgtattacttgagtaagacgatttctaagcgtggttctccgcattctaaggcgcagaatcagcagacgttgaagttttcggtagctggtcctagcaacatggctgtccagggaagaaactacatacctggacccagctaccgacaacaacgtgtctcaaccactgtgactcaaaacaacaacagcgaatttgcttggcctggagcttcttcttgggctctcaatggacgtaatagcttgatgaatcctggacctgctatggccagccacaaagaaggagaggaccgtttctttcctttgtctggatctttaatttttggcaaacaaggaactggaagagacaacgtggatgcggacaaagtcatgataaccaacgaagaagaaattaaaactactaacccggtagcaacggagtcctatggacaagtggccacaaaccaccagagtgcccaagcacaggcgcagaccggctgggttcaaaaccaaggaatacttccgggtatggtttggcaggacagagatgtgtacctgcaaggacccatttgggccaaaattcctcacacggacggcaactttcacccttctccgctgatgggagggtttggaatgaagcacccgcctcctcagatcctcatcaaaaacacacctgtacctgcggatcctccaacggccttcaacaaggacaagctgaactctttcatcacccagtattctactggccaagtcagcgtggagatcgagtgggagctgcagaaggaaaacagcaagcgctggaacccggagatccagtacacttccaactattacaagtctaataatgttgaatttgctgttaatactgaaggtgtatatagtgaaccccgccccattggcacgcggtatttaacgaggaactta

SEQ ID NO: 26 - DNA, 2226 bp, synthetic construct
  source 1..2226: mol_type = other DNA
atggctgccgatggttatcttccagattggctcgaggacaaccttagtgaaggaattcgcgagtggtgggctttgaaacctggagcccctcaacccaaggcaaatcaacaacatcaagacaacgctcgaggtcttgtgcttccgggttacaaataccttggacccggcaacggactcgacaagggggagccggtcaacgcagcagacgcggcggccctcgagcacgacaaggcctacgaccagcagctcaaggccggagacaacccgtacctcaagtacaaccacgccgacgccgagttccaggagcggctcaaagaagatacgtcttttgggggcaacctcgggcgagcagtcttccaggccaaaaagaggcttcttgaacctcttggtctggttgaggaagcggctaagacggctcctggaaagaagaggcctgtagagcagtctcctcaggaaccggactcctccgcgggtattggcaaatcgggtgcacagcccgctaaaaagagactcaatttcggtcagactggcgacacagagtcagtcccagaccctcaaccaatcggagaacctcccgcagccccctcaggtgtgggatctcttacaatggcttcaggtggtggcgcaccagtggcagacaataacgaaggtgccgatggagtgggtagttcctcgggaaattggcattgcgattcccaatggctgggggacagagtcatcaccaccagcacccgaacctgggccctgcccacctacaacaatcacctctacaagcaaatctccaacagcacatctggaggatcttcaaatgacaacgcctacttcggctacagcaccccctgggggtattttgacttcaacagattccactgccacttctcaccacgtgactggcagcgactcatcaacaacaactggggattccggcctaagcgactcaacttcaagctcttcaacattcaggtcaaagaggttacggacaacaatggagtcaagaccatcgccaataaccttaccagcacggtccaggtcttcacggactcagactatcagctcccgtacgtgctcgggtcggctcacgagggctgcctcccgccgttcccagcggacgttttcatgattcctcagtacgggtatctgacgcttaatgatggaagccaggccgtgggtcgttcgtccttttactgcctggaatatttcccgtcgcaaatgctaagaacgggtaacaacttccagttcagctacgagtttgagaacgtacctttccatagcagctacgctcacagccaaagcctggaccgactaatgaatccactcatcgatcagtatctgtattacttgagtaagggtctgggtggttctggttctccgcattctaaggcgcagaatcagcagacgttgaagttttcggtagctggtcctagcaacatggctgtccagggaagaaactacatacctggacccagctaccgacaacaacgtgtctcaaccactgtgactcaaaacaacaacagcgaatttgcttggcctggagcttcttcttgggctctcaatggacgtaatagcttgatgaatcctggacctgctatggccagccacaaagaaggagaggaccgtttctttcctttgtctggatctttaatttttggcaaacaaggaactggaagagacaacgtggatgcggacaaagtcatgataaccaacgaagaagaaattaaaactactaacccggtagcaacggagtcctatggacaagtggccacaaaccaccagagtgcccaagcacaggcgcagaccggctgggttcaaaaccaaggaatacttccgggtatggtttggcaggacagagatgtgtacctgcaaggacccatttgggccaaaattcctcacacggacggcaactttcacccttctccgctgatgggagggtttggaatgaagcacccgcctcctcagatcctcatcaaaaacacacctgtacctgcggatcctccaacggccttcaacaaggacaagctgaactctttcatcacccagtattctactggccaagtcagcgtggagatcgagtgggagctgcagaaggaaaacagcaagcgctggaacccggagatccagtacacttccaactattacaagtctaataatgttgaatttgctgttaatactgaaggtgtatatagtgaaccccgccccattggcacgcggtatttaacgaggaactta

SEQ ID NO: 27 - DNA, 2226 bp, synthetic construct
  source 1..2226: mol_type = other DNA
atggctgccgatggttatcttccagattggctcgaggacaaccttagtgaaggaattcgcgagtggtgggctttgaaacctggagcccctcaacccaaggcaaatcaacaacatcaagacaacgctcgaggtcttgtgcttccgggttacaaataccttggacccggcaacggactcgacaagggggagccggtcaacgcagcagacgcggcggccctcgagcacgacaaggcctacgaccagcagctcaaggccggagacaacccgtacctcaagtacaaccacgccgacgccgagttccaggagcggctcaaagaagatacgtcttttgggggcaacctcgggcgagcagtcttccaggccaaaaagaggcttcttgaacctcttggtctggttgaggaagcggctaagacggctcctggaaagaagaggcctgtagagcagtctcctcaggaaccggactcctccgcgggtattggcaaatcgggtgcacagcccgctaaaaagagactcaatttcggtcagactggcgacacagagtcagtcccagaccctcaaccaatcggagaacctcccgcagccccctcaggtgtgggatctcttacaatggcttcaggtggtggcgcaccagtggcagacaataacgaaggtgccgatggagtgggtagttcctcgggaaattggcattgcgattcccaatggctgggggacagagtcatcaccaccagcacccgaacctgggccctgcccacctacaacaatcacctctacaagcaaatctccaacagcacatctggaggatcttcaaatgacaacgcctacttcggctacagcaccccctgggggtattttgacttcaacagattccactgccacttctcaccacgtgactggcagcgactcatcaacaacaactggggattccggcctaagcgactcaacttcaagctcttcaacattcaggtcaaagaggttacggacaacaatggagtcaagaccatcgccaataaccttaccagcacggtccaggtcttcacggactcagactatcagctcccgtacgtgctcgggtcggctcacgagggctgcctcccgccgttcccagcggacgttttcatgattcctcagtacgggtatctgacgcttaatgatggaagccaggccgtgggtcgttcgtccttttactgcctggaatatttcccgtcgcaaatgctaagaacgggtaacaacttccagttcagctacgagtttgagaacgtacctttccatagcagctacgctcacagccaaagcctggaccgactaatgaatccactcatcgatcagtatctgtattacttgagtaagacgattaatggtcatgattctccgcattctaaggcgcagaatctgcagacgttgaagttttcggtagctggtcctagcaacatggctgtccagggaagaaactacatacctggacccagctaccgacaacaacgtgtctcaaccactgtgactcaaaacaacaacagcgaatttgcttggcctggagcttcttcttgggctctcaatggacgtaatagcttgatgaatcctggacctgctatggccagccacaaagaaggagaggaccgtttctttcctttgtctggatctttaatttttggcaaacaaggaactggaagagacaacgtggatgcggacaaagtcatgataaccaacgaagaagaaattaaaactactaacccggtagcaacggagtcctatggacaagtggccacaaaccaccagagtgcccaagcacaggcgcagaccggctgggttcaaaaccaaggaatacttccgggtatggtttggcaggacagagatgtgtacctgcaaggacccatttgggccaaaattcctcacacggacggcaactttcacccttctccgctgatgggagggtttggaatgaagcacccgcctcctcagatcctcatcaaaaacacacctgtacctgcggatcctccaacggccttcaacaaggacaagctgaactctttcatcacccagtattctactggccaagtcagcgtggagatcgagtgggagctgcagaaggaaaacagcaagcgctggaacccggagatccagtacacttccaactattacaagtctaataatgttgaatttgctgttaatactgaaggtgtatatagtgaaccccgccccattggcacgcggtatttaacgaggaactta

SEQ ID NO: 28 - DNA, 2226 bp, synthetic construct
  source 1..2226: mol_type = other DNA
atggctgccgatggttatcttccagattggctcgaggacaaccttagtgaaggaattcgcgagtggtgggctttgaaacctggagcccctcaacccaaggcaaatcaacaacatcaagacaacgctcgaggtcttgtgcttccgggttacaaataccttggacccggcaacggactcgacaagggggagccggtcaacgcagcagacgcggcggccctcgagcacgacaaggcctacgaccagcagctcaaggccggagacaacccgtacctcaagtacaaccacgccgacgccgagttccaggagcggctcaaagaagatacgtcttttgggggcaacctcgggcgagcagtcttccaggccaaaaagaggcttcttgaacctcttggtctggttgaggaagcggctaagacggctcctggaaagaagaggcctgtagagcagtctcctcaggaaccggactcctccgcgggtattggcaaatcgggtgcacagcccgctaaaaagagactcaatttcggtcagactggcgacacagagtcagtcccagaccctcaaccaatcggagaacctcccgcagccccctcaggtgtgggatctcttacaatggcttcaggtggtggcgcaccagtggcagacaataacgaaggtgccgatggagtgggtagttcctcgggaaattggcattgcgattcccaatggctgggggacagagtcatcaccaccagcacccgaacctgggccctgcccacctacaacaatcacctctacaagcaaatctccaacagcacatctggaggatcttcaaatgacaacgcctacttcggctacagcaccccctgggggtattttgacttcaacagattccactgccacttctcaccacgtgactggcagcgactcatcaacaacaactggggattccggcctaagcgactcaacttcaagctcttcaacattcaggtcaaagaggttacggacaacaatggagtcaagaccatcgccaataaccttaccagcacggtccaggtcttcacggactcagactatcagctcccgtacgtgctcgggtcggctcacgagggctgcctcccgccgttcccagcggacgttttcatgattcctcagtacgggtatctgacgcttaatgatggaagccaggccgtgggtcgttcgtccttttactgcctggaatatttcccgtcgcaaatgctaagaacgggtaacaacttccagttcagctacgagtttgagaacgtacctttccatagcagctacgctcacagccaaagcctggaccgactaatgaatccactcatcgatcagtatctgtattacttgagtaagacggtgaatggtcatgattctccgcattctaaggcgcagaatcagcagacgttgaagttttcggtagctggtcctagcaacatggctgtccagggaagaaactacatacctggacccagctaccgacaacaacgtgtctcaaccactgtgactcaaaacaacaacagcgaatttgcttggcctggagcttcttcttgggctctcaatggacgtaatagcttgatgaatcctggacctgctatggccagccacaaagaaggagaggaccgtttctttcctttgtctggatctttaatttttggcaaacaaggaactggaagagacaacgtggatgcggacaaagtcatgataaccaacgaagaagaaattaaaactactaacccggtagcaacggagtcctatggacaagtggccacaaaccaccagagtgcccaagcacaggcgcagaccggctgggttcaaaaccaaggaatacttccgggtatggtttggcaggacagagatgtgtacctgcaaggacccatttgggccaaaattcctcacacggacggcaactttcacccttctccgctgatgggagggtttggaatgaagcacccgcctcctcagatcctcatcaaaaacacacctgtacctgcggatcctccaacggccttcaacaaggacaagctgaactctttcatcacccagtattctactggccaagtcagcgtggagatcgagtgggagctgcagaaggaaaacagcaagcgctggaacccggagatccagtacacttccaactattacaagtctaataatgttgaatttgctgttaatactgaaggtgtatatagtgaaccccgccccattggcacgcggtatttaacgaggaactta

SEQ ID NO: 29 - DNA, 2226 bp, synthetic construct
  source 1..2226: mol_type = other DNA
atggctgccgatggttatcttccagattggctcgaggacaaccttagtgaaggaattcgcgagtggtgggctttgaaacctggagcccctcaacccaaggcaaatcaacaacatcaagacaacgctcgaggtcttgtgcttccgggttacaaataccttggacccggcaacggactcgacaagggggagccggtcaacgcagcagacgcggcggccctcgagcacgacaaggcctacgaccagcagctcaaggccggagacaacccgtacctcaagtacaaccacgccgacgccgagttccaggagcggctcaaagaagatacgtcttttgggggcaacctcgggcgagcagtcttccaggccaaaaagaggcttcttgaacctcttggtctggttgaggaagcggctaagacggctcctggaaagaagaggcctgtagagcagtctcctcaggaaccggactcctccgcgggtattggcaaatcgggtgcacagcccgctaaaaagagactcaatttcggtcagactggcgacacagagtcagtcccagaccctcaaccaatcggagaacctcccgcagccccctcaggtgtgggatctcttacaatggcttcaggtggtggcgcaccagtggcagacaataacgaaggtgccgatggagtgggtagttcctcgggaaattggcattgcgattcccaatggctgggggacagagtcatcaccaccagcacccgaacctgggccctgcccacctacaacaatcacctctacaagcaaatctccaacagcacatctggaggatcttcaaatgacaacgcctacttcggctacagcaccccctgggggtattttgacttcaacagattccactgccacttctcaccacgtgactggcagcgactcatcaacaacaactggggattccggcctaagcgactcaacttcaagctcttcaacattcaggtcaaagaggttacggacaacaatggagtcaagaccatcgccaataaccttaccagcacggtccaggtcttcacggactcagactatcagctcccgtacgtgctcgggtcggctcacgagggctgcctcccgccgttcccagcggacgttttcatgattcctcagtacgggtatctgacgcttaatgatggaagccaggccgtgggtcgttcgtccttttactgcctggaatatttcccgtcgcaaatgctaagaacgggtaacaacttccagttcagctacgagtttgagaacgtacctttccatagcagctacgctcacagccaaagcctggaccgactaatgaatccactcatcgatcagtatctgtattacttgagtaagacgattaatggtcatgattctccgcattctaaggcgctgaatcagcagacgttgaagttttcggtagctggtcctagcaacatggctgtccagggaagaaactacatacctggacccagctaccgacaacaacgtgtctcaaccactgtgactcaaaacaacaacagcgaatttgcttggcctggagcttcttcttgggctctcaatggacgtaatagcttgatgaatcctggacctgctatggccagccacaaagaaggagaggaccgtttctttcctttgtctggatctttaatttttggcaaacaaggaactggaagagacaacgtggatgcggacaaagtcatgataaccaacgaagaagaaattaaaactactaacccggtagcaacggagtcctatggacaagtggccacaaaccaccagagtgcccaagcacaggcgcagaccggctgggttcaaaaccaaggaatacttccgggtatggtttggcaggacagagatgtgtacctgcaaggacccatttgggccaaaattcctcacacggacggcaactttcacccttctccgctgatgggagggtttggaatgaagcacccgcctcctcagatcctcatcaaaaacacacctgtacctgcggatcctccaacggccttcaacaaggacaagctgaactctttcatcacccagtattctactggccaagtcagcgtggagatcgagtgggagctgcagaaggaaaacagcaagcgctggaacccggagatccagtacacttccaactattacaagtctaataatgttgaatttgctgttaatactgaaggtgtatatagtgaaccccgccccattggcacgcggtatttaacgaggaactta

SEQ ID NO: 30 - DNA, 2226 bp, synthetic construct
  source 1..2226: mol_type = other DNA
atggctgccgatggttatcttccagattggctcgaggacaaccttagtgaaggaattcgcgagtggtgggctttgaaacctggagcccctcaacccaaggcaaatcaacaacatcaagacaacgctcgaggtcttgtgcttccgggttacaaataccttggacccggcaacggactcgacaagggggagccggtcaacgcagcagacgcggcggccctcgagcacgacaaggcctacgaccagcagctcaaggccggagacaacccgtacctcaagtacaaccacgccgacgccgagttccaggagcggctcaaagaagatacgtcttttgggggcaacctcgggcgagcagtcttccaggccaaaaagaggcttcttgaacctcttggtctggttgaggaagcggctaagacggctcctggaaagaagaggcctgtagagcagtctcctcaggaaccggactcctccgcgggtattggcaaatcgggtgcacagcccgctaaaaagagactcaatttcggtcagactggcgacacagagtcagtcccagaccctcaaccaatcggagaacctcccgcagccccctcaggtgtgggatctcttacaatggcttcaggtggtggcgcaccagtggcagacaataacgaaggtgccgatggagtgggtagttcctcgggaaattggcattgcgattcccaatggctgggggacagagtcatcaccaccagcacccgaacctgggccctgcccacctacaacaatcacctctacaagcaaatctccaacagcacatctggaggatcttcaaatgacaacgcctacttcggctacagcaccccctgggggtattttgacttcaacagattccactgccacttctcaccacgtgactggcagcgactcatcaacaacaactggggattccggcctaagcgactcaacttcaagctcttcaacattcaggtcaaagaggttacggacaacaatggagtcaagaccatcgccaataaccttaccagcacggtccaggtcttcacggactcagactatcagctcccgtacgtgctcgggtcggctcacgagggctgcctcccgccgttcccagcggacgttttcatgattcctcagtacgggtatctgacgcttaatgatggaagccaggccgtgggtcgttcgtccttttactgcctggaatatttcccgtcgcaaatgctaagaacgggtaacaacttccagttcagctacgagtttgagaacgtacctttccatagcagctacgctcacagccaaagcctggaccgactaatgaatccactcatcgatcagtatctgtattacttgagtaagacgattaatggtcatgattctccgcattctaaggcgcagaatcagcagtctttgaagttttcggtagctggtcctagcaacatggctgtccagggaagaaactacatacctggacccagctaccgacaacaacgtgtctcaaccactgtgactcaaaacaacaacagcgaatttgcttggcctggagcttcttcttgggctctcaatggacgtaatagcttgatgaatcctggacctgctatggccagccacaaagaaggagaggaccgtttctttcctttgtctggatctttaatttttggcaaacaaggaactggaagagacaacgtggatgcggacaaagtcatgataaccaacgaagaagaaattaaaactactaacccggtagcaacggagtcctatggacaagtggccacaaaccaccagagtgcccaagcacaggcgcagaccggctgggttcaaaaccaaggaatacttccgggtatggtttggcaggacagagatgtgtacctgcaaggacccatttgggccaaaattcctcacacggacggcaactttcacccttctccgctgatgggagggtttggaatgaagcacccgcctcctcagatcctcatcaaaaacacacctgtacctgcggatcctccaacggccttcaacaaggacaagctgaactctttcatcacccagtattctactggccaagtcagcgtggagatcgagtgggagctgcagaaggaaaacagcaagcgctggaacccggagatccagtacacttccaactattacaagtctaataatgttgaatttgctgttaatactgaaggtgtatatagtgaaccccgccccattggcacgcggtatttaacgaggaactta

SEQ ID NO: 31 - DNA, 2226 bp, synthetic construct
  source 1..2226: mol_type = other DNA
atggctgccgatggttatcttccagattggctcgaggacaaccttagtgaaggaattcgcgagtggtgggctttgaaacctggagcccctcaacccaaggcaaatcaacaacatcaagacaacgctcgaggtcttgtgcttccgggttacaaataccttggacccggcaacggactcgacaagggggagccggtcaacgcagcagacgcggcggccctcgagcacgacaaggcctacgaccagcagctcaaggccggagacaacccgtacctcaagtacaaccacgccgacgccgagttccaggagcggctcaaagaagatacgtcttttgggggcaacctcgggcgagcagtcttccaggccaaaaagaggcttcttgaacctcttggtctggttgaggaagcggctaagacggctcctggaaagaagaggcctgtagagcagtctcctcaggaaccggactcctccgcgggtattggcaaatcgggtgcacagcccgctaaaaagagactcaatttcggtcagactggcgacacagagtcagtcccagaccctcaaccaatcggagaacctcccgcagccccctcaggtgtgggatctcttacaatggcttcaggtggtggcgcaccagtggcagacaataacgaaggtgccgatggagtgggtagttcctcgggaaattggcattgcgattcccaatggctgggggacagagtcatcaccaccagcacccgaacctgggccctgcccacctacaacaatcacctctacaagcaaatctccaacagcacatctggaggatcttcaaatgacaacgcctacttcggctacagcaccccctgggggtattttgacttcaacagattccactgccacttctcaccacgtgactggcagcgactcatcaacaacaactggggattccggcctaagcgactcaacttcaagctcttcaacattcaggtcaaagaggttacggacaacaatggagtcaagaccatcgccaataaccttaccagcacggtccaggtcttcacggactcagactatcagctcccgtacgtgctcgggtcggctcacgagggctgcctcccgccgttcccagcggacgttttcatgattcctcagtacgggtatctgacgcttaatgatggaagccaggccgtgggtcgttcgtccttttactgcctggaatatttcccgtcgcaaatgctaagaacgggtaacaacttccagttcagctacgagtttgagaacgtacctttccatagcagctacgctcacagccaaagcctggaccgactaatgaatccactcatcgatcagtatctgtattacttgagtaagacgattaatggtcatgattctccgcattctaaggcgcagaatcagcagattttgaagttttcggtagctggtcctagcaacatggctgtccagggaagaaactacatacctggacccagctaccgacaacaacgtgtctcaaccactgtgactcaaaacaacaacagcgaatttgcttggcctggagcttcttcttgggctctcaatggacgtaatagcttgatgaatcctggacctgctatggccagccacaaagaaggagaggaccgtttctttcctttgtctggatctttaatttttggcaaacaaggaactggaagagacaacgtggatgcggacaaagtcatgataaccaacgaagaagaaattaaaactactaacccggtagcaacggagtcctatggacaagtggccacaaaccaccagagtgcccaagcacaggcgcagaccggctgggttcaaaaccaaggaatacttccgggtatggtttggcaggacagagatgtgtacctgcaaggacccatttgggccaaaattcctcacacggacggcaactttcacccttctccgctgatgggagggtttggaatgaagcacccgcctcctcagatcctcatcaaaaacacacctgtacctgcggatcctccaacggccttcaacaaggacaagctgaactctttcatcacccagtattctactggccaagtcagcgtggagatcgagtgggagctgcagaaggaaaacagcaagcgctggaacccggagatccagtacacttccaactattacaagtctaataatgttgaatttgctgttaatactgaaggtgtatatagtgaaccccgccccattggcacgcggtatttaacgaggaactta

SEQ ID NO: 32 - DNA, 2226 bp, synthetic construct
  source 1..2226: mol_type = other DNA
atggctgccgatggttatcttccagattggctcgaggacaaccttagtgaaggaattcgcgagtggtgggctttgaaacctggagcccctcaacccaaggcaaatcaacaacatcaagacaacgctcgaggtcttgtgcttccgggttacaaataccttggacccggcaacggactcgacaagggggagccggtcaacgcagcagacgcggcggccctcgagcacgacaaggcctacgaccagcagctcaaggccggagacaacccgtacctcaagtacaaccacgccgacgccgagttccaggagcggctcaaagaagatacgtcttttgggggcaacctcgggcgagcagtcttccaggccaaaaagaggcttcttgaacctcttggtctggttgaggaagcggctaagacggctcctggaaagaagaggcctgtagagcagtctcctcaggaaccggactcctccgcgggtattggcaaatcgggtgcacagcccgctaaaaagagactcaatttcggtcagactggcgacacagagtcagtcccagaccctcaaccaatcggagaacctcccgcagccccctcaggtgtgggatctcttacaatggcttcaggtggtggcgcaccagtggcagacaataacgaaggtgccgatggagtgggtagttcctcgggaaattggcattgcgattcccaatggctgggggacagagtcatcaccaccagcacccgaacctgggccctgcccacctacaacaatcacctctacaagcaaatctccaacagcacatctggaggatcttcaaatgacaacgcctacttcggctacagcaccccctgggggtattttgacttcaacagattccactgccacttctcaccacgtgactggcagcgactcatcaacaacaactggggattccggcctaagcgactcaacttcaagctcttcaacattcaggtcaaagaggttacggacaacaatggagtcaagaccatcgccaataaccttaccagcacggtccaggtcttcacggactcagactatcagctcccgtacgtgctcgggtcggctcacgagggctgcctcccgccgttcccagcggacgttttcatgattcctcagtacgggtatctgacgcttaatgatggaagccaggccgtgggtcgttcgtccttttactgcctggaatatttcccgtcgcaaatgctaagaacgggtaacaacttccagttcagctacgagtttgagaacgtacctttccatagcagctacgctcacagccaaagcctggaccgactaatgaatccactcatcgatcagtatctgtattacttgagtaagacgattaatggttctggttctccgcattttacgcgtcagaatcagcagacgttgaagttttcggtagctggtcctagcaacatggctgtccagggaagaaactacatacctggacccagctaccgacaacaacgtgtctcaaccactgtgactcaaaacaacaacagcgaatttgcttggcctggagcttcttcttgggctctcaatggacgtaatagcttgatgaatcctggacctgctatggccagccacaaagaaggagaggaccgtttctttcctttgtctggatctttaatttttggcaaacaaggaactggaagagacaacgtggatgcggacaaagtcatgataaccaacgaagaagaaattaaaactactaacccggtagcaacggagtcctatggacaagtggccacaaaccaccagagtgcccaagcacaggcgcagaccggctgggttcaaaaccaaggaatacttccgggtatggtttggcaggacagagatgtgtacctgcaaggacccatttgggccaaaattcctcacacggacggcaactttcacccttctccgctgatgggagggtttggaatgaagcacccgcctcctcagatcctcatcaaaaacacacctgtacctgcggatcctccaacggccttcaacaaggacaagctgaactctttcatcacccagtattctactggccaagtcagcgtggagatcgagtgggagctgcagaaggaaaacagcaagcgctggaacccggagatccagtacacttccaactattacaagtctaataatgttgaatttgctgttaatactgaaggtgtatatagtgaaccccgccccattggcacgcggtatttaacgaggaactta

SEQ ID NO: 33 - DNA, 2226 bp, synthetic construct
  source 1..2226: mol_type = other DNA
atggctgccgatggttatcttccagattggctcgaggacaaccttagtgaaggaattcgcgagtggtgggctttgaaacctggagcccctcaacccaaggcaaatcaacaacatcaagacaacgctcgaggtcttgtgcttccgggttacaaataccttggacccggcaacggactcgacaagggggagccggtcaacgcagcagacgcggcggccctcgagcacgacaaggcctacgaccagcagctcaaggccggagacaacccgtacctcaagtacaaccacgccgacgccgagttccaggagcggctcaaagaagatacgtcttttgggggcaacctcgggcgagcagtcttccaggccaaaaagaggcttcttgaacctcttggtctggttgaggaagcggctaagacggctcctggaaagaagaggcctgtagagcagtctcctcaggaaccggactcctccgcgggtattggcaaatcgggtgcacagcccgctaaaaagagactcaatttcggtcagactggcgacacagagtcagtcccagaccctcaaccaatcggagaacctcccgcagccccctcaggtgtgggatctcttacaatggcttcaggtggtggcgcaccagtggcagacaataacgaaggtgccgatggagtgggtagttcctcgggaaattggcattgcgattcccaatggctgggggacagagtcatcaccaccagcacccgaacctgggccctgcccacctacaacaatcacctctacaagcaaatctccaacagcacatctggaggatcttcaaatgacaacgcctacttcggctacagcaccccctgggggtattttgacttcaacagattccactgccacttctcaccacgtgactggcagcgactcatcaacaacaactggggattccggcctaagcgactcaacttcaagctcttcaacattcaggtcaaagaggttacggacaacaatggagtcaagaccatcgccaataaccttaccagcacggtccaggtcttcacggactcagactatcagctcccgtacgtgctcgggtcggctcacgagggctgcctcccgccgttcccagcggacgttttcatgattcctcagtacgggtatctgacgcttaatgatggaagccaggccgtgggtcgttcgtccttttactgcctggaatatttcccgtcgcaaatgctaagaacgggtaacaacttccagttcagctacgagtttgagaacgtacctttccatagcagctacgctcacagccaaagcctggaccgactaatgaatccactcatcgatcagtatctgtattacttgagtaagacgtctaatggtcatgattctccgcattctaaggcgcagaatcagcagacgttgaagttttcggtagctggtcctagcaacatggctgtccagggaagaaactacatacctggacccagctaccgacaacaacgtgtctcaaccactgtgactcaaaacaacaacagcgaatttgcttggcctggagcttcttcttgggctctcaatggacgtaatagcttgatgaatcctggacctgctatggccagccacaaagaaggagaggaccgtttctttcctttgtctggatctttaatttttggcaaacaaggaactggaagagacaacgtggatgcggacaaagtcatgataaccaacgaagaagaaattaaaactactaacccggtagcaacggagtcctatggacaagtggccacaaaccaccagagtgcccaagcacaggcgcagaccggctgggttcaaaaccaaggaatacttccgggtatggtttggcaggacagagatgtgtacctgcaaggacccatttgggccaaaattcctcacacggacggcaactttcacccttctccgctgatgggagggtttggaatgaagcacccgcctcctcagatcctcatcaaaaacacacctgtacctgcggatcctccaacggccttcaacaaggacaagctgaactctttcatcacccagtattctactggccaagtcagcgtggagatcgagtgggagctgcagaaggaaaacagcaagcgctggaacccggagatccagtacacttccaactattacaagtctaataatgttgaatttgctgttaatactgaaggtgtatatagtgaaccccgccccattggcacgcggtatttaacgaggaactta

SEQ ID NO: 34 - DNA, 2226 bp, synthetic construct
  source 1..2226: mol_type = other DNA
atggctgccgatggttatcttccagattggctcgaggacaaccttagtgaaggaattcgcgagtggtgggctttgaaacctggagcccctcaacccaaggcaaatcaacaacatcaagacaacgctcgaggtcttgtgcttccgggttacaaataccttggacccggcaacggactcgacaagggggagccggtcaacgcagcagacgcggcggccctcgagcacgacaaggcctacgaccagcagctcaaggccggagacaacccgtacctcaagtacaaccacgccgacgccgagttccaggagcggctcaaagaagatacgtcttttgggggcaacctcgggcgagcagtcttccaggccaaaaagaggcttcttgaacctcttggtctggttgaggaagcggctaagacggctcctggaaagaagaggcctgtagagcagtctcctcaggaaccggactcctccgcgggtattggcaaatcgggtgcacagcccgctaaaaagagactcaatttcggtcagactggcgacacagagtcagtcccagaccctcaaccaatcggagaacctcccgcagccccctcaggtgtgggatctcttacaatggcttcaggtggtggcgcaccagtggcagacaataacgaaggtgccgatggagtgggtagttcctcgggaaattggcattgcgattcccaatggctgggggacagagtcatcaccaccagcacccgaacctgggccctgcccacctacaacaatcacctctacaagcaaatctccaacagcacatctggaggatcttcaaatgacaacgcctacttcggctacagcaccccctgggggtattttgacttcaacagattccactgccacttctcaccacgtgactggcagcgactcatcaacaacaactggggattccggcctaagcgactcaacttcaagctcttcaacattcaggtcaaagaggttacggacaacaatggagtcaagaccatcgccaataaccttaccagcacggtccaggtcttcacggactcagactatcagctcccgtacgtgctcgggtcggctcacgagggctgcctcccgccgttcccagcggacgttttcatgattcctcagtacgggtatctgacgcttaatgatggaagccaggccgtgggtcgttcgtccttttactgcctggaatatttcccgtcgcaaatgctaagaacgggtaacaacttccagttcagctacgagtttgagaacgtacctttccatagcagctacgctcacagccaaagcctggaccgactaatgaatccactcatcgatcagtatctgtattacttgagtaagacgattaatggttctggttctccgcattctctgccgtggaatcagcagacgttgaagttttcggtagctggtcctagcaacatggctgtccagggaagaaactacatacctggacccagctaccgacaacaacgtgtctcaaccactgtgactcaaaacaacaacagcgaatttgcttggcctggagcttcttcttgggctctcaatggacgtaatagcttgatgaatcctggacctgctatggccagccacaaagaaggagaggaccgtttctttcctttgtctggatctttaatttttggcaaacaaggaactggaagagacaacgtggatgcggacaaagtcatgataaccaacgaagaagaaattaaaactactaacccggtagcaacggagtcctatggacaagtggccacaaaccaccagagtgcccaagcacaggcgcagaccggctgggttcaaaaccaaggaatacttccgggtatggtttggcaggacagagatgtgtacctgcaaggacccatttgggccaaaattcctcacacggacggcaactttcacccttctccgctgatgggagggtttggaatgaagcacccgcctcctcagatcctcatcaaaaacacacctgtacctgcggatcctccaacggccttcaacaaggacaagctgaactctttcatcacccagtattctactggccaagtcagcgtggagatcgagtgggagctgcagaaggaaaacagcaagcgctggaacccggagatccagtacacttccaactattacaagtctaataatgttgaatttgctgttaatactgaaggtgtatatagtgaaccccgccccattggcacgcggtatttaacgaggaactta

SEQ ID NO: 35 - DNA, 2226 bp, synthetic construct
  source 1..2226: mol_type = other DNA
atggctgccgatggttatcttccagattggctcgaggacaaccttagtgaaggaattcgcgagtggtgggctttgaaacctggagcccctcaacccaaggcaaatcaacaacatcaagacaacgctcgaggtcttgtgcttccgggttacaaataccttggacccggcaacggactcgacaagggggagccggtcaacgcagcagacgcggcggccctcgagcacgacaaggcctacgaccagcagctcaaggccggagacaacccgtacctcaagtacaaccacgccgacgccgagttccaggagcggctcaaagaagatacgtcttttgggggcaacctcgggcgagcagtcttccaggccaaaaagaggcttcttgaacctcttggtctggttgaggaagcggctaagacggctcctggaaagaagaggcctgtagagcagtctcctcaggaaccggactcctccgcgggtattggcaaatcgggtgcacagcccgctaaaaagagactcaatttcggtcagactggcgacacagagtcagtcccagaccctcaaccaatcggagaacctcccgcagccccctcaggtgtgggatctcttacaatggcttcaggtggtggcgcaccagtggcagacaataacgaaggtgccgatggagtgggtagttcctcgggaaattggcattgcgattcccaatggctgggggacagagtcatcaccaccagcacccgaacctgggccctgcccacctacaacaatcacctctacaagcaaatctccaacagcacatctggaggatcttcaaatgacaacgcctacttcggctacagcaccccctgggggtattttgacttcaacagattccactgccacttctcaccacgtgactggcagcgactcatcaacaacaactggggattccggcctaagcgactcaacttcaagctcttcaacattcaggtcaaagaggttacggacaacaatggagtcaagaccatcgccaataaccttaccagcacggtccaggtcttcacggactcagactatcagctcccgtacgtgctcgggtcggctcacgagggctgcctcccgccgttcccagcggacgttttcatgattcctcagtacgggtatctgacgcttaatgatggaagccaggccgtgggtcgttcgtccttttactgcctggaatatttcccgtcgcaaatgctaagaacgggtaacaacttccagttcagctacgagtttgagaacgtacctttccatagcagctacgctcacagccaaagcctggaccgactaatgaatccactcatcgatcagtatctgtattacttgagtaagacgattaatggtcatgattctccgcattctaaggcgcagaatcatcagacgttgaagttttcggtagctggtcctagcaacatggctgtccagggaagaaactacatacctggacccagctaccgacaacaacgtgtctcaaccactgtgactcaaaacaacaacagcgaatttgcttggcctggagcttcttcttgggctctcaatggacgtaatagcttgatgaatcctggacctgctatggccagccacaaagaaggagaggaccgtttctttcctttgtctggatctttaatttttggcaaacaaggaactggaagagacaacgtggatgcggacaaagtcatgataaccaacgaagaagaaattaaaactactaacccggtagcaacggagtcctatggacaagtggccacaaaccaccagagtgcccaagcacaggcgcagaccggctgggttcaaaaccaaggaatacttccgggtatggtttggcaggacagagatgtgtacctgcaaggacccatttgggccaaaattcctcacacggacggcaactttcacccttctccgctgatgggagggtttggaatgaagcacccgcctcctcagatcctcatcaaaaacacacctgtacctgcggatcctccaacggccttcaacaaggacaagctgaactctttcatcacccagtattctactggccaagtcagcgtggagatcgagtgggagctgcagaaggaaaacagcaagcgctggaacccggagatccagtacacttccaactattacaagtctaataatgttgaatttgctgttaatactgaaggtgtatatagtgaaccccgccccattggcacgcggtatttaacgaggaactta

SEQ ID NO: 36 - protein, 742 aa, synthetic construct
MAADGYLPDWLEDNLSEGIREWWALKPGAPQPKANQQHQDNARGLVLPGYKYLGPGNGLDKGEPVNAADAAALEHDKAYDQQLKAGDNPYLKYNHADAEFQERLKEDTSFGGNLGRAVFQAKKRLLEPLGLVEEAAKTAPGKKRPVEQSPQEPDSSAGIGKSGAQPAKKRLNFGQTGDTESVPDPQPIGEPPAAPSGVGSLTMASGGGAPVADNNEGADGVGSSSGNWHCDSQWLGDRVITTSTRTWALPTYNNHLYKQISNSTSGGSSNDNAYFGYSTPWGYFDFNRFHCHFSPRDWQRLINNNWGFRPKRLNFKLFNIQVKEVTDNNGVKTIANNLTSTVQVFTDSDYQLPYVLGSAHEGCLPPFPADVFMIPQYGYLTLNDGSQAVGRSSFYCLEYFPSQMLRTGNNFQFSYEFENVPFHSSYAHSQSLDRLMNPLIDQYLYYLSKTERVSGSPHSKAQNQQTLKFSVAGPSNMAVQGRNYIPGPSYRQQRVSTTVTQNNNSEFAWPGASSWALNGRNSLMNPGPAMASHKEGEDRFFPLSGSLIFGKQGTGRDNVDADKVMITNEEEIKTTNPVATESYGQVATNHQSAQAQAQTGWVQNQGILPGMVWQDRDVYLQGPIWAKIPHTDGNFHPSPLMGGFGMKHPPPQILIKNTPVPADPPTAFNKDKLNSFITQYSTGQVSVEIEWELQKENSKRWNPEIQYTSNYYKSNNVEFAVNTEGVYSEPRPIGTRYLTRNL

SEQ ID NO: 37 - protein, 742 aa, synthetic construct
MAADGYLPDWLEDNLSEGIREWWALKPGAPQPKANQQHQDNARGLVLPGYKYLGPGNGLDKGEPVNAADAAALEHDKAYDQQLKAGDNPYLKYNHADAEFQERLKEDTSFGGNLGRAVFQAKKRLLEPLGLVEEAAKTAPGKKRPVEQSPQEPDSSAGIGKSGAQPAKKRLNFGQTGDTESVPDPQPIGEPPAAPSGVGSLTMASGGGAPVADNNEGADGVGSSSGNWHCDSQWLGDRVITTSTRTWALPTYNNHLYKQISNSTSGGSSNDNAYFGYSTPWGYFDFNRFHCHFSPRDWQRLINNNWGFRPKRLNFKLFNIQVKEVTDNNGVKTIANNLTSTVQVFTDSDYQLPYVLGSAHEGCLPPFPADVFMIPQYGYLTLNDGSQAVGRSSFYCLEYFPSQMLRTGNNFQFSYEFENVPFHSSYAHSQSLDRLMNPLIDQYLYYLSKAEIGHDSPHKSGQNQQTLKFSVAGPSNMAVQGRNYIPGPSYRQQRVSTTVTQNNNSEFAWPGASSWALNGRNSLMNPGPAMASHKEGEDRFFPLSGSLIFGKQGTGRDNVDADKVMITNEEEIKTTNPVATESYGQVATNHQSAQAQAQTGWVQNQGILPGMVWQDRDVYLQGPIWAKIPHTDGNFHPSPLMGGFGMKHPPPQILIKNTPVPADPPTAFNKDKLNSLITQYSTGQVSVEIEWELQKENSKRWNPEIQYTSNYYKSNNVEFAVNTEGVYSEPRPIGTRYLTRNL

SEQ ID NO: 38 - protein, 742 aa, synthetic construct
MAADGYLPDWLEDNLSEGIREWWALKPGAPQPKANQQHQDNARGLVLPGYKYLGPGNGLDKGEPVNAADAAALEHDKAYDQQLKAGDNPYLKYNHADAEFQERLKEDTSFGGNLGRAVFQAKKRLLEPLGLVEEAAKTAPGKKRPVEQSPQEPDSSAGIGKSGAQPAKKRLNFGQTGDTESVPDPQPIGEPPAAPSGVGSLTMASGGGAPVADNNEGADGVGSSSGNWHCDSQWLGDRVITTSTRTWALPTYNNHLYKQISNSTSGGSSNDNAYFGYSTPWGYFDFNRFHCHFSPRDWQRLINNNWGFRPKRLNFKLFNIQVKEVTDNNGVKTIANNLTSTVQVFTDSDYQLPYVLGSAHEGCLPPFPADVFMIPQYGYLTLNDGSQAVGRSSFYCLEYFPSQMLRTGNNFQFSYEFENVPFHSSYAHSQSLDRLMNPLIDQYLYYLSKTIIGSGSPHSKAQNRHTLKFSVAGPSNMAVQGRNYIPGPSYRQQRVSTTVTQNNNSEFAWPGASSWALNGRNSLMNPGPAMASHKEGEDRFFPLSGSLIFGKQGTGRDNVDADKVMITNEEEIKTTNPVATESYGQVATNHQSAQAQAQTGWVQNQGILPGMVWQDRDVYLQGPIWAKIPHTDGNFHPSPLMGGFGMKHPPPQILIKNTPVPADPPTAFNKDKLNSFITQYSTGQVSVEIEWELQKENSKRWNPEIQYTSNYYKSNNVEFAVNTEGVYSEPRPIGTRYLTRNL

SEQ ID NO: 39 - protein, 742 aa, synthetic construct
MAADGYLPDWLEDNLSEGIREWWALKPGAPQPKANQQHQDNARGLVLPGYKYLGPGNGLDKGEPVNAADAAALEHDKAYDQQLKAGDNPYLKYNHADAEFQERLKEDTSFGGNLGRAVFQAKKRLLEPLGLVEEAAKTAPGKKRPVEQSPQEPDSSAGIGKSGAQPAKKRLNFGQTGDTESVPDPQPIGEPPAAPSGVGSLTMASGGGAPVADNNEGADGVGSSSGNWHCDSQWLGDRVITTSTRTWALPTYNNHLYKQISNSTSGGSSNDNAYFGYSTPWGYFDFNRFHCHFSPRDWQRLINNNWGFRPKRLNFKLFNIQVKEVTDNNGVKTIANNLTSTVQVFTDSDYQLPYVLGSAHEGCLPPFPADVFMIPQYGYLTLNDGSQAVGRSSFYCLEYFPSQMLRTGNNFQFSYEFENVPFHSSYAHSQSLDRLMNPLIDQYLYYLSKTEKMSGSPHSKAQNQQTLKFSVAGPSNMAVQGRNYIPGPSYRQQRVSTTVTQNNNSEFAWPGASSWALNGRNSLMNPGPAMASHKEGEDRFFPLSGSLIFGKQGTGRDNVDADKVMITNEEEIKTTNPVATESYGQVATNHQSAQAQAQTGWVQNQGILPGMVWQDRDVYLQGPIWAKIPHTDGNFHPSPLMGGFGMKHPPPQILIKNTPVPADPPTAFNKDKLNSFITQYSTGQVSVEIEWELQKENSKRWNPEIQYTSNYYKSNNVEFAVNTEGVYSEPRPIGTRYLTRNL

SEQ ID NO: 40 - protein, 742 aa, synthetic construct
MAADGYLPDWLEDNLSEGIREWWALKPGAPQPKANQQHQDNARGLVLPGYKYLGPGNGLDKGEPVNAADAAALEHDKAYDQQLKAGDNPYLKYNHADAEFQERLKEDTSFGGNLGRAVFQAKKRLLEPLGLVEEAAKTAPGKKRPVEQSPQEPDSSAGIGKSGAQPAKKRLNFGQTGDTESVPDPQPIGEPPAAPSGVGSLTMASGGGAPVADNNEGADGVGSSSGNWHCDSQWLGDRVITTSTRTWALPTYNNHLYKQISNSTSGGSSNDNAYFGYSTPWGYFDFNRFHCHFSPRDWQRLINNNWGFRPKRLNFKLFNIQVKEVTDNNGVKTIANNLTSTVQVFTDSDYQLPYVLGSAHEGCLPPFPADVFMIPQYGYLTLNDGSQAVGRSSFYCLEYFPSQMLRTGNNFQFSYEFENVPFHSSYAHSQSLDRLMNPLIDQYLYYLSKEINGRGSPHSKAQNQQTLKFSVAGPSNMAVQGRNYIPGPSYRQQRVSTTVTQNNNSEFAWPGASSWALNGRNSLMNPGPAMASHKEGEDRFFPLSGSLIFGKQGTGRDNVDADKVMITNEEEIKTTNPVATESYGQVATNHQSAQAQAQTGWVQNQGILPGMVWQDRDVYLQGPIWAKIPHTDGNFHPSPLMGGFGMKHPPPQILIKNTPVPADPPTAFNKDKLNSFITQYSTGQVSVEIEWELQKENSKRWNPEIQYTSNYYKSNNVEFAVNTEGVYSEPRPIGTRYLTRNL

SEQ ID NO: 41 - protein, 742 aa, synthetic construct
MAADGYLPDWLEDNLSEGIREWWALKPGAPQPKANQQHQDNARGLVLPGYKYLGPGNGLDKGEPVNAADAAALEHDKAYDQQLKAGDNPYLKYNHADAEFQERLKEDTSFGGNLGRAVFQAKKRLLEPLGLVEEAAKTAPGKKRPVEQSPQEPDSSAGIGKSGAQPAKKRLNFGQTGDTESVPDPQPIGEPPAAPSGVGSLTMASGGGAPVADNNEGADGVGSSSGNWHCDSQWLGDRVITTSTRTWALPTYNNHLYKQISNSTSGGSSNDNAYFGYSTPWGYFDFNRFHCHFSPRDWQRLINNNWGFRPKRLNFKLFNIQVKEVTDNNGVKTIANNLTSTVQVFTDSDYQLPYVLGSAHEGCLPPFPADVFMIPQYGYLTLNDGSQAVGRSSFYCLEYFPSQMLRTGNNFQFSYEFENVPFHSSYAHSQSLDRLMNPLIDQYLYYLSKTFNGSGSPHSKAPNLQTLKFSVAGPSNMAVQGRNYIPGPSYRQQRVSTTVTQNNNSEFAWPGASSWALNGRNSLMNPGPAMASHKEGEDRFFPLSGSLIFGKQGTGRDNVDADKVMITNEEEIKTTNPVATESYGQVATNHQSAQAQAQTGWVQNQGILPGMVWQDRDVYLQGPIWAKIPHTDGNFHPSPLMGGFGMKHPPPQILIKNTPVPADPPTAFNKDKLNSFITQYSTGQVSVEIEWELQKENSKRWNPEIQYTSNYYKSNNVEFAVNTEGVYSEPRPIGTRYLTRNL

SEQ ID NO: 42 - protein, 742 aa, synthetic construct
MAADGYLPDWLEDNLSEGIREWWALKPGAPQPKANQQHQDNARGLVLPGYKYLGPGNGLDKGEPVNAADAAALEHDKAYDQQLKAGDNPYLKYNHADAEFQERLKEDTSFGGNLGRAVFQAKKRLLEPLGLVEEAAKTAPGKKRPVEQSPQEPDSSAGIGKSGAQPAKKRLNFGQTGDTESVPDPQPIGEPPAAPSGVGSLTMASGGGAPVADNNEGADGVGSSSGNWHCDSQWLGDRVITTSTRTWALPTYNNHLYKQISNSTSGGSSNDNAYFGYSTPWGYFDFNRFHCHFSPRDWQRLINNNWGFRPKRLNFKLFNIQVKEVTDNNGVKTIANNLTSTVQVFTDSDYQLPYVLGSAHEGCLPPFPADVFMIPQYGYLTLNDGSQAVGRSSFYCLEYFPSQMLRTGNNFQFSYEFENVPFHSSYAHSQSLDRLMNPLIDQYLYYLSKTEKTSGSPHSKAQNQQTLKFSVAGPSNMAVQGRNYIPGPSYRQQRVSTTVTQNNNSEFAWPGASSWALNGRNSLMNPGPAMASHKEGEDRFFPLSGSLIFGKQGTGRDNVDADKVMITNEEEIKTTNPVATESYGQVATNHQSAQAQAQTGWVQNQGILPGMVWQDRDVYLQGPIWAKIPHTDGNFHPSPLMGGFGMKHPPPQILIKNTPVPADPPTAFNKDKLNSFITQYSTGQVSVEIEWELQKENSKRWNPEIQYTSNYYKSNNVEFAVNTEGVYSEPRPIGTRYLTRNL

SEQ ID NO: 43 - protein, 742 aa, synthetic construct
MAADGYLPDWLEDNLSEGIREWWALKPGAPQPKANQQHQDNARGLVLPGYKYLGPGNGLDKGEPVNAADAAALEHDKAYDQQLKAGDNPYLKYNHADAEFQERLKEDTSFGGNLGRAVFQAKKRLLEPLGLVEEAAKTAPGKKRPVEQSPQEPDSSAGIGKSGAQPAKKRLNFGQTGDTESVPDPQPIGEPPAAPSGVGSLTMASGGGAPVADNNEGADGVGSSSGNWHCDSQWLGDRVITTSTRTWALPTYNNHLYKQISNSTSGGSSNDNAYFGYSTPWGYFDFNRFHCHFSPRDWQRLINNNWGFRPKRLNFKLFNIQVKEVTDNNGVKTIANNLTSTVQVFTDSDYQLPYVLGSAHEGCLPPFPADVFMIPQYGYLTLNDGSQAVGRSSFYCLEYFPSQMLRTGNNFQFSYEFENVPFHSSYAHSQSLDRLMNPLIDQYLYYLSKTMNGHDSPHSKAQNQQTLKFSVAGPSNMAVQGRNYIPGPSYRQQRVSTTVTQNNNSEFAWPGASSWALNGRNSLMNPGPAMASHKEGEDRFFPLSGSLIFGKQGTGRDNVDADKVMITNEEEIKTTNPVATESYGQVATNHQSAQAQAQTGWVQNQGILPGMVWQDRDVYLQGPIWAKIPHTDGNFHPSPLMGGFGMKHPPPQILIKNTPVPADPPTAFNKDKLNSFITQYSTGQVSVEIEWELQKENSKRWNPEIQYTSNYYKSNNVEFAVNTEGVYSEPRPIGTRYLTRNL

SEQ ID NO: 44 - protein, 742 aa, synthetic construct
MAADGYLPDWLEDNLSEGIREWWALKPGAPQPKANQQHQDNARGLVLPGYKYLGPGNGLDKGEPVNAADAAALEHDKAYDQQLKAGDNPYLKYNHADAEFQERLKEDTSFGGNLGRAVFQAKKRLLEPLGLVEEAAKTAPGKKRPVEQSPQEPDSSAGIGKSGAQPAKKRLNFGQTGDTESVPDPQPIGEPPAAPSGVGSLTMASGGGAPVADNNEGADGVGSSSGNWHCDSQWLGDRVITTSTRTWALPTYNNHLYKQISNSTSGGSSNDNAYFGYSTPWGYFDFNRFHCHFSPRDWQRLINNNWGFRPKRLNFKLFNIQVKEVTDNNGVKTIANNLTSTVQVFTDSDYQLPYVLGSAHEGCLPPFPADVFMIPQYGYLTLNDGSQAVGRSSFYCLEYFPSQMLRTGNNFQFSYEFENVPFHSSYAHSQSLDRLMNPLIDQYLYYLSKTIDGHDSPHSKAQNQQTLKFSVAGPSNMAVQGRNYIPGPSYRQQRVSTTVTQNNNSEFAWPGASSWALNGRNSLMNPGPAMASHKEGEDRFFPLSGSLIFGKQGTGRDNVDADKVMITNEEEIKTTNPVATESYGQVATNHQSAQAQAQTGWVQNQGILPGMVWQDRDVYLQGPIWAKIPHTDGNFHPSPLMGGFGMKHPPPQILIKNTPVPADPPTAFNKDKLNSFITQYSTGQVSVEIEWELQKENSKRWNPEIQYTSNYYKSNNVEFAVNTEGVYSEPRPIGTRYLTRNL

SEQ ID NO: 45 - protein, 742 aa, synthetic construct
MAADGYLPDWLEDNLSEGIREWWALKPGAPQPKANQQHQDNARGLVLPGYKYLGPGNGLDKGEPVNAADAAALEHDKAYDQQLKAGDNPYLKYNHADAEFQERLKEDTSFGGNLGRAVFQAKKRLLEPLGLVEEAAKTAPGKKRPVEQSPQEPDSSAGIGKSGAQPAKKRLNFGQTGDTESVPDPQPIGEPPAAPSGVGSLTMASGGGAPVADNNEGADGVGSSSGNWHCDSQWLGDRVITTSTRTWALPTYNNHLYKQISNSTSGGSSNDNAYFGYSTPWGYFDFNRFHCHFSPRDWQRLINNNWGFRPKRLNFKLFNIQVKEVTDNNGVKTIANNLTSTVQVFTDSDYQLPYVLGSAHEGCLPPFPADVFMIPQYGYLTLNDGSQAVGRSSFYCLEYFPSQMLRTGNNFQFSYEFENVPFHSSYAHSQSLDRLMNPLIDQYLYYLSKTNNGHDSPHSKAQNQQTLKFSVAGPSNMAVQGRNYIPGPSYRQQRVSTTVTQNNNSEFAWPGASSWALNGRNSLMNPGPAMASHKEGEDRFFPLSGSLIFGKQGTGRDNVDADKVMITNEEEIKTTNPVATESYGQVATNHQSAQAQAQTGWVQNQGILPGMVWQDRDVYLQGPIWAKIPHTDGNFHPSPLMGGFGMKHPPPQILIKNTPVPADPPTAFNKDKLNSFITQYSTGQVSVEIEWELQKENSKRWNPEIQYTSNYYKSNNVEFAVNTEGVYSEPRPIGTRYLTRNL

SEQ ID NO: 46 - protein, 742 aa, synthetic construct
MAADGYLPDWLEDNLSEGIREWWALKPGAPQPKANQQHQDNARGLVLPGYKYLGPGNGLDKGEPVNAADAAALEHDKAYDQQLKAGDNPYLKYNHADAEFQERLKEDTSFGGNLGRAVFQAKKRLLEPLGLVEEAAKTAPGKKRPVEQSPQEPDSSAGIGKSGAQPAKKRLNFGQTGDTESVPDPQPIGEPPAAPSGVGSLTMASGGGAPVADNNEGADGVGSSSGNWHCDSQWLGDRVITTSTRTWALPTYNNHLYKQISNSTSGGSSNDNAYFGYSTPWGYFDFNRFHCHFSPRDWQRLINNNWGFRPKRLNFKLFNIQVKEVTDNNGVKTIANNLTSTVQVFTDSDYQLPYVLGSAHEGCLPPFPADVFMIPQYGYLTLNDGSQAVGRSSFYCLEYFPSQMLRTGNNFQFSYEFENVPFHSSYAHSQSLDRLMNPLIDQYLYYLSKTQRKSGSPHSKAQNQQTLKFSVAGPSNMAVQGRNYIPGPSYRQQRVSTTVTQNNNSEFAWPGASSWALNGRNSLMNPGPAMASHKEGEDRFFPLSGSLIFGKQGTGRDNVDADKVMITNEEEIKTTNPVATESYGQVATNHQSAQAQAQTGWVQNQGILPGMVWQDRDVYLQGPIWAKIPHTDGNFHPSPLMGGFGMKHPPPQILIKNTPVPADPPTAFNKDKLNSFITQYSTGQVSVEIEWELQKENSKRWNPEIQYTSNYYKSNNVEFAVNTEGVYSEPRPIGTRYLTRNL

SEQ ID NO: 47 - protein, 742 aa, synthetic construct
MAADGYLPDWLEDNLSEGIREWWALKPGAPQPKANQQHQDNARGLVLPGYKYLGPGNGLDKGEPVNAADAAALEHDKAYDQQLKAGDNPYLKYNHADAEFQERLKEDTSFGGNLGRAVFQAKKRLLEPLGLVEEAAKTAPGKKRPVEQSPQEPDSSAGIGKSGAQPAKKRLNFGQTGDTESVPDPQPIGEPPAAPSGVGSLTMASGGGAPVADNNEGADGVGSSSGNWHCDSQWLGDRVITTSTRTWALPTYNNHLYKQISNSTSGGSSNDNAYFGYSTPWGYFDFNRFHCHFSPRDWQRLINNNWGFRPKRLNFKLFNIQVKEVTDNNGVKTIANNLTSTVQVFTDSDYQLPYVLGSAHEGCLPPFPADVFMIPQYGYLTLNDGSQAVGRSSFYCLEYFPSQMLRTGNNFQFSYEFENVPFHSSYAHSQSLDRLMNPLIDQYLYYLSKTINGSGSPHSKAQARKTLKFSVAGPSNMAVQGRNYIPGPSYRQQRVSTTVTQNNNSEFAWPGASSWALNGRNSLMNPGPAMASHKEGEDRFFPLSGSLIFGKQGTGRDNVDADKVMITNEEEIKTTNPVATESYGQVATNHQSAQAQAQTGWVQNQGILPGMVWQDRDVYLQGPIWAKIPHTDGNFHPSPLMGGFGMKHPPPQILIKNTPVPADPPTAFNKDKLNSFITQYSTGQVSVEIEWELQKENSKRWNPEIQYTSNYYKSNNVEFAVNTEGVYSEPRPIGTRYLTRNL

SEQ ID NO: 48 - protein, 742 aa, synthetic construct
MAADGYLPDWLEDNLSEGIREWWALKPGAPQPKANQQHQDNARGLVLPGYKYLGPGNGLDKGEPVNAADAAALEHDKAYDQQLKAGDNPYLKYNHADAEFQERLKEDTSFGGNLGRAVFQAKKRLLEPLGLVEEAAKTAPGKKRPVEQSPQEPDSSAGIGKSGAQPAKKRLNFGQTGDTESVPDPQPIGEPPAAPSGVGSLTMASGGGAPVADNNEGADGVGSSSGNWHCDSQWLGDRVITTSTRTWALPTYNNHLYKQISNSTSGGSSNDNAYFGYSTPWGYFDFNRFHCHFSPRDWQRLINNNWGFRPKRLNFKLFNIQVKEVTDNNGVKTIANNLTSTVQVFTDSDYQLPYVLGSAHEGCLPPFPADVFMIPQYGYLTLNDGSQAVGRSSFYCLEYFPSQMLRTGNNFQFSYEFENVPFHSSYAHSQSLDRLMNPLIDQYLYYLSKYIVGSGSPHSKAQNQQTLKFSVAGPSNMAVQGRNYIPGPSYRQQRVSTTVTQNNNSEFAWPGASSWALNGRNSLMNPGPAMASHKEGEDRFFPLSGSLIFGKQGTGRDNVDADKVMITNEEEIKTTNPVATESYGQVATNHQSAQAQAQTGWVQNQGILPGMVWQDRDVYLQGPIWAKIPHTDGNFHPSPLMGGFGMKHPPPQILIKNTPVPADPPTAFNKDKLNSFITQYSTGQVSVEIEWELQKENSKRWNPEIQYTSNYYKSNNVEFAVNTEGVYSEPRPIGTRYLTRNL

SEQ ID NO: 49 - protein, 742 aa, synthetic construct
MAADGYLPDWLEDNLSEGIREWWALKPGAPQPKANQQHQDNARGLVLPGYKYLGPGNGLDKGEPVNAADAAALEHDKAYDQQLKAGDNPYLKYNHADAEFQERLKEDTSFGGNLGRAVFQAKKRLLEPLGLVEEAAKTAPGKKRPVEQSPQEPDSSAGIGKSGAQPAKKRLNFGQTGDTESVPDPQPIGEPPAAPSGVGSLTMASGGGAPVADNNEGADGVGSSSGNWHCDSQWLGDRVITTSTRTWALPTYNNHLYKQISNSTSGGSSNDNAYFGYSTPWGYFDFNRFHCHFSPRDWQRLINNNWGFRPKRLNFKLFNIQVKEVTDNNGVKTIANNLTSTVQVFTDSDYQLPYVLGSAHEGCLPPFPADVFMIPQYGYLTLNDGSQAVGRSSFYCLEYFPSQMLRTGNNFQFSYEFENVPFHSSYAHSQSLDRLMNPLIDQYLYYLSKTISKRGSPHSKAQNQQTLKFSVAGPSNMAVQGRNYIPGPSYRQQRVSTTVTQNNNSEFAWPGASSWALNGRNSLMNPGPAMASHKEGEDRFFPLSGSLIFGKQGTGRDNVDADKVMITNEEEIKTTNPVATESYGQVATNHQSAQAQAQTGWVQNQGILPGMVWQDRDVYLQGPIWAKIPHTDGNFHPSPLMGGFGMKHPPPQILIKNTPVPADPPTAFNKDKLNSFITQYSTGQVSVEIEWELQKENSKRWNPEIQYTSNYYKSNNVEFAVNTEGVYSEPRPIGTRYLTRNL

SEQ ID NO: 50 - protein, 742 aa, synthetic construct
MAADGYLPDWLEDNLSEGIREWWALKPGAPQPKANQQHQDNARGLVLPGYKYLGPGNGLDKGEPVNAADAAALEHDKAYDQQLKAGDNPYLKYNHADAEFQERLKEDTSFGGNLGRAVFQAKKRLLEPLGLVEEAAKTAPGKKRPVEQSPQEPDSSAGIGKSGAQPAKKRLNFGQTGDTESVPDPQPIGEPPAAPSGVGSLTMASGGGAPVADNNEGADGVGSSSGNWHCDSQWLGDRVITTSTRTWALPTYNNHLYKQISNSTSGGSSNDNAYFGYSTPWGYFDFNRFHCHFSPRDWQRLINNNWGFRPKRLNFKLFNIQVKEVTDNNGVKTIANNLTSTVQVFTDSDYQLPYVLGSAHEGCLPPFPADVFMIPQYGYLTLNDGSQAVGRSSFYCLEYFPSQMLRTGNNFQFSYEFENVPFHSSYAHSQSLDRLMNPLIDQYLYYLSKGLGGSGSPHSKAQNQQTLKFSVAGPSNMAVQGRNYIPGPSYRQQRVSTTVTQNNNSEFAWPGASSWALNGRNSLMNPGPAMASHKEGEDRFFPLSGSLIFGKQGTGRDNVDADKVMITNEEEIKTTNPVATESYGQVATNHQSAQAQAQTGWVQNQGILPGMVWQDRDVYLQGPIWAKIPHTDGNFHPSPLMGGFGMKHPPPQILIKNTPVPADPPTAFNKDKLNSFITQYSTGQVSVEIEWELQKENSKRWNPEIQYTSNYYKSNNVEFAVNTEGVYSEPRPIGTRYLTRNL

SEQ ID NO: 51 - protein, 742 aa, synthetic construct
MAADGYLPDWLEDNLSEGIREWWALKPGAPQPKANQQHQDNARGLVLPGYKYLGPGNGLDKGEPVNAADAAALEHDKAYDQQLKAGDNPYLKYNHADAEFQERLKEDTSFGGNLGRAVFQAKKRLLEPLGLVEEAAKTAPGKKRPVEQSPQEPDSSAGIGKSGAQPAKKRLNFGQTGDTESVPDPQPIGEPPAAPSGVGSLTMASGGGAPVADNNEGADGVGSSSGNWHCDSQWLGDRVITTSTRTWALPTYNNHLYKQISNSTSGGSSNDNAYFGYSTPWGYFDFNRFHCHFSPRDWQRLINNNWGFRPKRLNFKLFNIQVKEVTDNNGVKTIANNLTSTVQVFTDSDYQLPYVLGSAHEGCLPPFPADVFMIPQYGYLTLNDGSQAVGRSSFYCLEYFPSQMLRTGNNFQFSYEFENVPFHSSYAHSQSLDRLMNPLIDQYLYYLSKTINGHDSPHSKAQNLQTLKFSVAGPSNMAVQGRNYIPGPSYRQQRVSTTVTQNNNSEFAWPGASSWALNGRNSLMNPGPAMASHKEGEDRFFPLSGSLIFGKQGTGRDNVDADKVMITNEEEIKTTNPVATESYGQVATNHQSAQAQAQTGWVQNQGILPGMVWQDRDVYLQGPIWAKIPHTDGNFHPSPLMGGFGMKHPPPQILIKNTPVPADPPTAFNKDKLNSFITQYSTGQVSVEIEWELQKENSKRWNPEIQYTSNYYKSNNVEFAVNTEGVYSEPRPIGTRYLTRNL

SEQ ID NO: 52 - protein, 742 aa, synthetic construct
MAADGYLPDWLEDNLSEGIREWWALKPGAPQPKANQQHQDNARGLVLPGYKYLGPGNGLDKGEPVNAADAAALEHDKAYDQQLKAGDNPYLKYNHADAEFQERLKEDTSFGGNLGRAVFQAKKRLLEPLGLVEEAAKTAPGKKRPVEQSPQEPDSSAGIGKSGAQPAKKRLNFGQTGDTESVPDPQPIGEPPAAPSGVGSLTMASGGGAPVADNNEGADGVGSSSGNWHCDSQWLGDRVITTSTRTWALPTYNNHLYKQISNSTSGGSSNDNAYFGYSTPWGYFDFNRFHCHFSPRDWQRLINNNWGFRPKRLNFKLFNIQVKEVTDNNGVKTIANNLTSTVQVFTDSDYQLPYVLGSAHEGCLPPFPADVFMIPQYGYLTLNDGSQAVGRSSFYCLEYFPSQMLRTGNNFQFSYEFENVPFHSSYAHSQSLDRLMNPLIDQYLYYLSKTVNGHDSPHSKAQNQQTLKFSVAGPSNMAVQGRNYIPGPSYRQQRVSTTVTQNNNSEFAWPGASSWALNGRNSLMNPGPAMASHKEGEDRFFPLSGSLIFGKQGTGRDNVDADKVMITNEEEIKTTNPVATESYGQVATNHQSAQAQAQTGWVQNQGILPGMVWQDRDVYLQGPIWAKIPHTDGNFHPSPLMGGFGMKHPPPQILIKNTPVPADPPTAFNKDKLNSFITQYSTGQVSVEIEWELQKENSKRWNPEIQYTSNYYKSNNVEFAVNTEGVYSEPRPIGTRYLTRNL

SEQ ID NO: 53 - protein, 742 aa, synthetic construct
MAADGYLPDWLEDNLSEGIREWWALKPGAPQPKANQQHQDNARGLVLPGYKYLGPGNGLDKGEPVNAADAAALEHDKAYDQQLKAGDNPYLKYNHADAEFQERLKEDTSFGGNLGRAVFQAKKRLLEPLGLVEEAAKTAPGKKRPVEQSPQEPDSSAGIGKSGAQPAKKRLNFGQTGDTESVPDPQPIGEPPAAPSGVGSLTMASGGGAPVADNNEGADGVGSSSGNWHCDSQWLGDRVITTSTRTWALPTYNNHLYKQISNSTSGGSSNDNAYFGYSTPWGYFDFNRFHCHFSPRDWQRLINNNWGFRPKRLNFKLFNIQVKEVTDNNGVKTIANNLTSTVQVFTDSDYQLPYVLGSAHEGCLPPFPADVFMIPQYGYLTLNDGSQAVGRSSFYCLEYFPSQMLRTGNNFQFSYEFENVPFHSSYAHSQSLDRLMNPLIDQYLYYLSKTINGHDSPHSKALNQQTLKFSVAGPSNMAVQGRNYIPGPSYRQQRVSTTVTQNNNSEFAWPGASSWALNGRNSLMNPGPAMASHKEGEDRFFPLSGSLIFGKQGTGRDNVDADKVMITNEEEIKTTNPVATESYGQVATNHQSAQAQAQTGWVQNQGILPGMVWQDRDVYLQGPIWAKIPHTDGNFHPSPLMGGFGMKHPPPQILIKNTPVPADPPTAFNKDKLNSFITQYSTGQVSVEIEWELQKENSKRWNPEIQYTSNYYKSNNVEFAVNTEGVYSEPRPIGTRYLTRNL

SEQ ID NO: 54 - protein, 742 aa, synthetic construct
MAADGYLPDWLEDNLSEGIREWWALKPGAPQPKANQQHQDNARGLVLPGYKYLGPGNGLDKGEPVNAADAAALEHDKAYDQQLKAGDNPYLKYNHADAEFQERLKEDTSFGGNLGRAVFQAKKRLLEPLGLVEEAAKTAPGKKRPVEQSPQEPDSSAGIGKSGAQPAKKRLNFGQTGDTESVPDPQPIGEPPAAPSGVGSLTMASGGGAPVADNNEGADGVGSSSGNWHCDSQWLGDRVITTSTRTWALPTYNNHLYKQISNSTSGGSSNDNAYFGYSTPWGYFDFNRFHCHFSPRDWQRLINNNWGFRPKRLNFKLFNIQVKEVTDNNGVKTIANNLTSTVQVFTDSDYQLPYVLGSAHEGCLPPFPADVFMIPQYGYLTLNDGSQAVGRSSFYCLEYFPSQMLRTGNNFQFSYEFENVPFHSSYAHSQSLDRLMNPLIDQYLYYLSKTINGHDSPHSKAQNQQSLKFSVAGPSNMAVQGRNYIPGPSYRQQRVSTTVTQNNNSEFAWPGASSWALNGRNSLMNPGPAMASHKEGEDRFFPLSGSLIFGKQGTGRDNVDADKVMITNEEEIKTTNPVATESYGQVATNHQSAQAQAQTGWVQNQGILPGMVWQDRDVYLQGPIWAKIPHTDGNFHPSPLMGGFGMKHPPPQILIKNTPVPADPPTAFNKDKLNSFITQYSTGQVSVEIEWELQKENSKRWNPEIQYTSNYYKSNNVEFAVNTEGVYSEPRPIGTRYLTRNL

SEQ ID NO: 55 - protein, 742 aa, synthetic construct
MAADGYLPDWLEDNLSEGIREWWALKPGAPQPKANQQHQDNARGLVLPGYKYLGPGNGLDKGEPVNAADAAALEHDKAYDQQLKAGDNPYLKYNHADAEFQERLKEDTSFGGNLGRAVFQAKKRLLEPLGLVEEAAKTAPGKKRPVEQSPQEPDSSAGIGKSGAQPAKKRLNFGQTGDTESVPDPQPIGEPPAAPSGVGSLTMASGGGAPVADNNEGADGVGSSSGNWHCDSQWLGDRVITTSTRTWALPTYNNHLYKQISNSTSGGSSNDNAYFGYSTPWGYFDFNRFHCHFSPRDWQRLINNNWGFRPKRLNFKLFNIQVKEVTDNNGVKTIANNLTSTVQVFTDSDYQLPYVLGSAHEGCLPPFPADVFMIPQYGYLTLNDGSQAVGRSSFYCLEYFPSQMLRTGNNFQFSYEFENVPFHSSYAHSQSLDRLMNPLIDQYLYYLSKTINGHDSPHSKAQNQQILKFSVAGPSNMAVQGRNYIPGPSYRQQRVSTTVTQNNNSEFAWPGASSWALNGRNSLMNPGPAMASHKEGEDRFFPLSGSLIFGKQGTGRDNVDADKVMITNEEEIKTTNPVATESYGQVATNHQSAQAQAQTGWVQNQGILPGMVWQDRDVYLQGPIWAKIPHTDGNFHPSPLMGGFGMKHPPPQILIKNTPVPADPPTAFNKDKLNSFITQYSTGQVSVEIEWELQKENSKRWNPEIQYTSNYYKSNNVEFAVNTEGVYSEPRPIGTRYLTRNL

SEQ ID NO: 56 - protein, 742 aa, synthetic construct
MAADGYLPDWLEDNLSEGIREWWALKPGAPQPKANQQHQDNARGLVLPGYKYLGPGNGLDKGEPVNAADAAALEHDKAYDQQLKAGDNPYLKYNHADAEFQERLKEDTSFGGNLGRAVFQAKKRLLEPLGLVEEAAKTAPGKKRPVEQSPQEPDSSAGIGKSGAQPAKKRLNFGQTGDTESVPDPQPIGEPPAAPSGVGSLTMASGGGAPVADNNEGADGVGSSSGNWHCDSQWLGDRVITTSTRTWALPTYNNHLYKQISNSTSGGSSNDNAYFGYSTPWGYFDFNRFHCHFSPRDWQRLINNNWGFRPKRLNFKLFNIQVKEVTDNNGVKTIANNLTSTVQVFTDSDYQLPYVLGSAHEGCLPPFPADVFMIPQYGYLTLNDGSQAVGRSSFYCLEYFPSQMLRTGNNFQFSYEFENVPFHSSYAHSQSLDRLMNPLIDQYLYYLSKTINGSGSPHFTRQNQQTLKFSVAGPSNMAVQGRNYIPGPSYRQQRVSTTVTQNNNSEFAWPGASSWALNGRNSLMNPGPAMASHKEGEDRFFPLSGSLIFGKQGTGRDNVDADKVMITNEEEIKTTNPVATESYGQVATNHQSAQAQAQTGWVQNQGILPGMVWQDRDVYLQGPIWAKIPHTDGNFHPSPLMGGFGMKHPPPQILIKNTPVPADPPTAFNKDKLNSFITQYSTGQVSVEIEWELQKENSKRWNPEIQYTSNYYKSNNVEFAVNTEGVYSEPRPIGTRYLTRNL

SEQ ID NO: 57 - protein, 742 aa, synthetic construct
MAADGYLPDWLEDNLSEGIREWWALKPGAPQPKANQQHQDNARGLVLPGYKYLGPGNGLDKGEPVNAADAAALEHDKAYDQQLKAGDNPYLKYNHADAEFQERLKEDTSFGGNLGRAVFQAKKRLLEPLGLVEEAAKTAPGKKRPVEQSPQEPDSSAGIGKSGAQPAKKRLNFGQTGDTESVPDPQPIGEPPAAPSGVGSLTMASGGGAPVADNNEGADGVGSSSGNWHCDSQWLGDRVITTSTRTWALPTYNNHLYKQISNSTSGGSSNDNAYFGYSTPWGYFDFNRFHCHFSPRDWQRLINNNWGFRPKRLNFKLFNIQVKEVTDNNGVKTIANNLTSTVQVFTDSDYQLPYVLGSAHEGCLPPFPADVFMIPQYGYLTLNDGSQAVGRSSFYCLEYFPSQMLRTGNNFQFSYEFENVPFHSSYAHSQSLDRLMNPLIDQYLYYLSKTSNGHDSPHSKAQNQQTLKFSVAGPSNMAVQGRNYIPGPSYRQQRVSTTVTQNNNSEFAWPGASSWALNGRNSLMNPGPAMASHKEGEDRFFPLSGSLIFGKQGTGRDNVDADKVMITNEEEIKTTNPVATESYGQVATNHQSAQAQAQTGWVQNQGILPGMVWQDRDVYLQGPIWAKIPHTDGNFHPSPLMGGFGMKHPPPQILIKNTPVPADPPTAFNKDKLNSFITQYSTGQVSVEIEWELQKENSKRWNPEIQYTSNYYKSNNVEFAVNTEGVYSEPRPIGTRYLTRNL

SEQ ID NO: 58 - protein, 742 aa, synthetic construct
MAADGYLPDWLEDNLSEGIREWWALKPGAPQPKANQQHQDNARGLVLPGYKYLGPGNGLDKGEPVNAADAAALEHDKAYDQQLKAGDNPYLKYNHADAEFQERLKEDTSFGGNLGRAVFQAKKRLLEPLGLVEEAAKTAPGKKRPVEQSPQEPDSSAGIGKSGAQPAKKRLNFGQTGDTESVPDPQPIGEPPAAPSGVGSLTMASGGGAPVADNNEGADGVGSSSGNWHCDSQWLGDRVITTSTRTWALPTYNNHLYKQISNSTSGGSSNDNAYFGYSTPWGYFDFNRFHCHFSPRDWQRLINNNWGFRPKRLNFKLFNIQVKEVTDNNGVKTIANNLTSTVQVFTDSDYQLPYVLGSAHEGCLPPFPADVFMIPQYGYLTLNDGSQAVGRSSFYCLEYFPSQMLRTGNNFQFSYEFENVPFHSSYAHSQSLDRLMNPLIDQYLYYLSKTINGSGSPHSLPWNQQTLKFSVAGPSNMAVQGRNYIPGPSYRQQRVSTTVTQNNNSEFAWPGASSWALNGRNSLMNPGPAMASHKEGEDRFFPLSGSLIFGKQGTGRDNVDADKVMITNEEEIKTTNPVATESYGQVATNHQSAQAQAQTGWVQNQGILPGMVWQDRDVYLQGPIWAKIPHTDGNFHPSPLMGGFGMKHPPPQILIKNTPVPADPPTAFNKDKLNSFITQYSTGQVSVEIEWELQKENSKRWNPEIQYTSNYYKSNNVEFAVNTEGVYSEPRPIGTRYLTRNL

SEQ ID NO: 59 - protein, 742 aa, synthetic construct
MAADGYLPDWLEDNLSEGIREWWALKPGAPQPKANQQHQDNARGLVLPGYKYLGPGNGLDKGEPVNAADAAALEHDKAYDQQLKAGDNPYLKYNHADAEFQERLKEDTSFGGNLGRAVFQAKKRLLEPLGLVEEAAKTAPGKKRPVEQSPQEPDSSAGIGKSGAQPAKKRLNFGQTGDTESVPDPQPIGEPPAAPSGVGSLTMASGGGAPVADNNEGADGVGSSSGNWHCDSQWLGDRVITTSTRTWALPTYNNHLYKQISNSTSGGSSNDNAYFGYSTPWGYFDFNRFHCHFSPRDWQRLINNNWGFRPKRLNFKLFNIQVKEVTDNNGVKTIANNLTSTVQVFTDSDYQLPYVLGSAHEGCLPPFPADVFMIPQYGYLTLNDGSQAVGRSSFYCLEYFPSQMLRTGNNFQFSYEFENVPFHSSYAHSQSLDRLMNPLIDQYLYYLSKTINGHDSPHSKAQNHQTLKFSVAGPSNMAVQGRNYIPGPSYRQQRVSTTVTQNNNSEFAWPGASSWALNGRNSLMNPGPAMASHKEGEDRFFPLSGSLIFGKQGTGRDNVDADKVMITNEEEIKTTNPVATESYGQVATNHQSAQAQAQTGWVQNQGILPGMVWQDRDVYLQGPIWAKIPHTDGNFHPSPLMGGFGMKHPPPQILIKNTPVPADPPTAFNKDKLNSFITQYSTGQVSVEIEWELQKENSKRWNPEIQYTSNYYKSNNVEFAVNTEGVYSEPRPIGTRYLTRNL

SEQ ID NO: 60-136 - skipped (77 entries)

SEQ ID NO: 137 - DNA, 2211 bp, synthetic construct
  source 1..2211: mol_type = other DNA
atggctgccgatggttatcttccagattggctcgaggacaaccttagtgaaggaattcgcgagtggtgggctttgaaacctggagcccctcaacccaaggcaaatcaacaacatcaagacaacgctcgaggtcttgtgcttccgggttacaaataccttggacccggcaacggactcgacaagggggagccggtcaacgcagcagacgcggcggccctcgagcacgacaaggcctacgaccagcagctcaaggccggagacaacccgtacctcaagtacaaccacgccgacgccgagttccaggagcggctcaaagaagatacgtcttttgggggcaacctcgggcgagcagtcttccaggccaaaaagaggcttcttgaacctcttggtctggttgaggaagcggctaagacggctcctggaaagaagaggcctgtagagcagtctcctcaggaaccggactcctccgcgggtattggcaaatcgggtgcacagcccgctaaaaagagactcaatttcggtcagactggcgacacagagtcagtcccagaccctcaaccaatcggagaacctcccgcagccccctcaggtgtgggatctcttacaatggcttcaggtggtggcgcaccagtggcagacaataacgaaggtgccgatggagtgggtagttcctcgggaaattggcattgcgattcccaatggctgggggacagagtcatcaccaccagcacccgaacctgggccctgcccacctacaacaatcacctctacaagcaaatctccaacagcacatctggaggatcttcaaatgacaacgcctacttcggctacagcaccccctgggggtattttgacttcaacagattccactgccacttctcaccacgtgactggcagcgactcatcaacaacaactggggattccggcctaagcgactcaacttcaagctcttcaacattcaggtcaaagaggttacggacaacaatggagtcaagaccatcgccaataaccttaccagcacggtccaggtcttcacggactcagactatcagctcccgtacgtgctcgggtcggctcacgagggctgcctcccgccgttcccagcggacgttttcatgattcctcagtacgggtatctgacgcttaatgatggaagccaggccgtgggtcgttcgtccttttactgcctggaatatttcccgtcgcaaatgctaagaacgggtaacaacttccagttcagctacgagtttgagaacgtacctttccatagcagctacgctcacagccaaagcctggaccgactaatgaatccactcatcgaccaatacttgtactatctctcaaagactattaacggttctggacagaatcaacaaacgctaaaattcagtgtggccggacccagcaacatggctgtccagggaagaaactacatacctggacccagctaccgacaacaacgtgtctcaaccactgtgactcaaaacaacaacagcgaatttgcttggcctggagcttcttcttgggctctcaatggacgtaatagcttgatgaatcctggacctgctatggccagccacaaagaaggagaggaccgtttctttcctttgtctggatctttaatttttggcaaacaaggaactggaagagacaacgtggatgcggacaaagtcatgataaccaacgaagaagaaattaaaactactaacccggtagcaacggagtcctatggacaagtggccacaaaccaccagagtgcccaagcacaggcgcagaccggctgggttcaaaaccaaggaatacttccgggtatggtttggcaggacagagatgtgtacctgcaaggacccatttgggccaaaattcctcacacggacggcaactttcacccttctccgctgatgggagggtttggaatgaagcacccgcctcctcagatcctcatcaaaaacacacctgtacctgcggatcctccaacggccttcaacaaggacaagctgaactctttcatcacccagtattctactggccaagtcagcgtggagatcgagtgggagctgcagaaggaaaacagcaagcgctggaacccggagatccagtacacttccaactattacaagtctaataatgttgaatttgctgttaatactgaaggtgtatatagtgaaccccgccccattggcaccagatacctgactcgtaatctgtaa

SEQ ID NO: 138 - protein, 736 aa, synthetic construct
MAADGYLPDWLEDNLSEGIREWWALKPGAPQPKANQQHQDNARGLVLPGYKYLGPGNGLDKGEPVNAADAAALEHDKAYDQQLKAGDNPYLKYNHADAEFQERLKEDTSFGGNLGRAVFQAKKRLLEPLGLVEEAAKTAPGKKRPVEQSPQEPDSSAGIGKSGAQPAKKRLNFGQTGDTESVPDPQPIGEPPAAPSGVGSLTMASGGGAPVADNNEGADGVGSSSGNWHCDSQWLGDRVITTSTRTWALPTYNNHLYKQISNSTSGGSSNDNAYFGYSTPWGYFDFNRFHCHFSPRDWQRLINNNWGFRPKRLNFKLFNIQVKEVTDNNGVKTIANNLTSTVQVFTDSDYQLPYVLGSAHEGCLPPFPADVFMIPQYGYLTLNDGSQAVGRSSFYCLEYFPSQMLRTGNNFQFSYEFENVPFHSSYAHSQSLDRLMNPLIDQYLYYLSKTINGSGQNQQTLKFSVAGPSNMAVQGRNYIPGPSYRQQRVSTTVTQNNNSEFAWPGASSWALNGRNSLMNPGPAMASHKEGEDRFFPLSGSLIFGKQGTGRDNVDADKVMITNEEEIKTTNPVATESYGQVATNHQSAQAQAQTGWVQNQGILPGMVWQDRDVYLQGPIWAKIPHTDGNFHPSPLMGGFGMKHPPPQILIKNTPVPADPPTAFNKDKLNSFITQYSTGQVSVEIEWELQKENSKRWNPEIQYTSNYYKSNNVEFAVNTEGVYSEPRPIGTRYLTRNL

SEQ ID NO: 139-199 - skipped (61 entries)

SEQ ID NO: 200 - protein, 14 aa, synthetic construct
GSGSPHSKAQNQQT

SEQ ID NO: 201 - protein, 14 aa, synthetic construct
GHDSPHKSGQNQQT

SEQ ID NO: 202 - protein, 14 aa, synthetic construct
GSGSPHARMQNQQT

SEQ ID NO: 203 - protein, 14 aa, synthetic construct
GSGSPHVKSQNQQT

SEQ ID NO: 204 - protein, 14 aa, synthetic construct
GQDSPHKSGQNQQT

SEQ ID NO: 205 - protein, 14 aa, synthetic construct
GSGSPHASRQNQQT

SEQ ID NO: 206 - protein, 14 aa, synthetic construct
GSGSPHASRQNKQT

SEQ ID NO: 207 - protein, 14 aa, synthetic construct
GSGSPHVKIQNQQT

SEQ ID NO: 208 - protein, 14 aa, synthetic construct
GSGSPHSKAKNQQT

SEQ ID NO: 209 - protein, 14 aa, synthetic construct
GSGSPHKKNQNQQT

SEQ ID NO: 210 - protein, 14 aa, synthetic construct
GSGSPHVRMQNQQT

SEQ ID NO: 211 - protein, 14 aa, synthetic construct
GSGSPHASRQKQQT

SEQ ID NO: 212 - protein, 14 aa, synthetic construct
GHSSPHRSGQNQQT

SEQ ID NO: 213 - protein, 14 aa, synthetic construct
GMRTYHLSGQNQQT

SEQ ID NO: 214 - protein, 14 aa, synthetic construct
GSGSPHTRGQNQQT

SEQ ID NO: 215 - protein, 14 aa, synthetic construct
GSGIIPVSSQNQQT

SEQ ID NO: 216 - protein, 14 aa, synthetic construct
GSEYGHKSGQNQQT

SEQ ID NO: 217 - protein, 14 aa, synthetic construct
GRGQNVSSVHRQQT

SEQ ID NO: 218 - protein, 14 aa, synthetic construct
GSSHRFYGGQNQQT

SEQ ID NO: 219 - protein, 14 aa, synthetic construct
GYFVAAWSGQNQQT

SEQ ID NO: 220 - protein, 14 aa, synthetic construct
GSVLHSHAAQNQQT

SEQ ID NO: 221 - protein, 14 aa, synthetic construct
GSGDLVVSTQNQQT

SEQ ID NO: 222 - protein, 14 aa, synthetic construct
GSYGMAASGQNQQT

SEQ ID NO: 223 - protein, 14 aa, synthetic construct
GLNHFGASGQNQQT

SEQ ID NO: 224 - protein, 14 aa, synthetic construct
GSTGSHSAGQNQHT

SEQ ID NO: 225 - protein, 14 aa, synthetic construct
GLAGHTVSGQNQQT

SEQ ID NO: 226 - protein, 14 aa, synthetic construct
GIILGASSGQNQQT

SEQ ID NO: 227 - protein, 14 aa, synthetic construct
GSGVSTYNIQNQQT

SEQ ID NO: 228 - protein, 14 aa, synthetic construct
GSLVSVQTGQNQQT

SEQ ID NO: 229 - protein, 14 aa, synthetic construct
GQSSPHRSGQNQQT

SEQ ID NO: 230 - protein, 14 aa, synthetic construct
GREYGHKSGQNQQT

SEQ ID NO: 231 - protein, 14 aa, synthetic construct
GHTLTLSSGQNQQT

SEQ ID NO: 232 - protein, 14 aa, synthetic construct
GSITLIPSGQNQQT

SEQ ID NO: 233 - protein, 14 aa, synthetic construct
GSNGFTALGQNQQT

SEQ ID NO: 234 - protein, 14 aa, synthetic construct
GSGHSSHSVQNQQT

SEQ ID NO: 235 - protein, 14 aa, synthetic construct
GSGIPQRSGKNQQT

SEQ ID NO: 236 - protein, 14 aa, synthetic construct
GSGDTLHMLQNQQT

SEQ ID NO: 237 - protein, 14 aa, synthetic construct
GERHTVLSGQNQQT

SEQ ID NO: 238 - protein, 14 aa, synthetic construct
GSGMPQSHIQNQQT

SEQ ID NO: 239 - protein, 14 aa, synthetic construct
GSGQLSGIGGNQQT

SEQ ID NO: 240 - protein, 14 aa, synthetic construct
GSGQNRKPASFAQT

SEQ ID NO: 241 - protein, 14 aa, synthetic construct
GSGSVSQLGQNQQT

SEQ ID NO: 242 - protein, 14 aa, synthetic construct
GSDFLGTHGQNQQT

SEQ ID NO: 243 - protein, 14 aa, synthetic construct
GQIVQNPSGQNQQT

SEQ ID NO: 244 - protein, 14 aa, synthetic construct
GSGTQIPSQQNQQT

SEQ ID NO: 245 - protein, 14 aa, synthetic construct
GSGQNQQSAREGLT

SEQ ID NO: 246 - protein, 14 aa, synthetic construct
GSGLGMSTGQNQQT

SEQ ID NO: 247 - protein, 14 aa, synthetic construct
GSGLPVLSGQNQQT

SEQ ID NO: 248 - protein, 14 aa, synthetic construct
GSGHSIRTDQNQQT

SEQ ID NO: 249 - protein, 14 aa, synthetic construct
GSGQSVQTVVNQQT

SEQ ID NO: 250 - protein, 14 aa, synthetic construct
GSGQNRAQSRFQQT

SEQ ID NO: 251 - protein, 14 aa, synthetic construct
GGGDLGRSSQNQQT

SEQ ID NO: 252 - protein, 14 aa, synthetic construct
GGGTKMDSGQNQQT

SEQ ID NO: 253 - protein, 14 aa, synthetic construct
GSGSPHPSRQNQQT

SEQ ID NO: 254 - protein, 14 aa, synthetic construct
GSGQFTNAGMNQQT

SEQ ID NO: 255 - protein, 14 aa, synthetic construct
GGRNGHTVGQNQQT

SEQ ID NO: 256 - protein, 14 aa, synthetic construct
GSGFGPQTGQNQQT

SEQ ID NO: 257 - protein, 14 aa, synthetic construct
GRTDSHTSGQNQQT

SEQ ID NO: 258 - protein, 14 aa, synthetic construct
GYEVLGSSGQNQQT

SEQ ID NO: 259 - protein, 14 aa, synthetic construct
GSVHLSVTGQNQQT

SEQ ID NO: 260 - protein, 14 aa, synthetic construct
GFMSYKGSGQNQQT

SEQ ID NO: 261 - protein, 14 aa, synthetic construct
GNIAGSVSGQNQQT

SEQ ID NO: 262 - protein, 14 aa, synthetic construct
GSGSHRDVSQNQQT

SEQ ID NO: 263 - protein, 14 aa, synthetic construct
GGLGSMSSGQNQQT

SEQ ID NO: 264 - protein, 14 aa, synthetic construct
GSGHLPQSAQNQQT

SEQ ID NO: 265 - protein, 14 aa, synthetic construct
GGVLVGGSGQNQQT

SEQ ID NO: 266 - protein, 14 aa, synthetic construct
GTHPYTSSGQNQQT

SEQ ID NO: 267 - protein, 14 aa, synthetic construct
GSGQNQQLKENRST

SEQ ID NO: 268 - protein, 14 aa, synthetic construct
GSGQNQQTSPHNHT

SEQ ID NO: 269 - protein, 14 aa, synthetic construct
GSGTLYPQSQNQQT

SEQ ID NO: 270 - protein, 14 aa, synthetic construct
GSGQNQQSNWITKT

SEQ ID NO: 271 - protein, 14 aa, synthetic construct
GSGYTSLFLQNQQT

SEQ ID NO: 272 - protein, 14 aa, synthetic construct
GSGVMTHVLQNQQT

SEQ ID NO: 273 - protein, 14 aa, synthetic construct
GSVSDVRAGQNQQT

SEQ ID NO: 274 - protein, 14 aa, synthetic construct
GSGQSHMATLNQQT

SEQ ID NO: 275 - protein, 14 aa, synthetic construct
GSGLSVHLAQNQQT

SEQ ID NO: 276 - protein, 14 aa, synthetic construct
GSGLSHATQQNQQT

SEQ ID NO: 277 - protein, 14 aa, synthetic construct
GSGLSVQSGQNQQT

SEQ ID NO: 278 - protein, 14 aa, synthetic construct
GSGHMTYREKNQQT

SEQ ID NO: 279 - protein, 14 aa, synthetic construct
GSKGVPTPGQNQQT

SEQ ID NO: 280 - protein, 14 aa, synthetic construct
GSGLLPLSSQNQQT

SEQ ID NO: 281 - protein, 14 aa, synthetic construct
GNGLYAVSGQNQQT

SEQ ID NO: 282 - protein, 14 aa, synthetic construct
GFNGSPSSGQNQQT

SEQ ID NO: 283 - protein, 14 aa, synthetic construct
GSGQIRHSDQNQQT

SEQ ID NO: 284 - protein, 14 aa, synthetic construct
GGQVAPSSGQNQQT

SEQ ID NO: 285 - protein, 14 aa, synthetic construct
GSFSMHTHGQNQQT

SEQ ID NO: 286 - protein, 14 aa, synthetic construct
GSGQNQQVIQGSNT

SEQ ID NO: 287 - protein, 14 aa, synthetic construct
GRVLHSHAGQNQQT

SEQ ID NO: 288 - protein, 14 aa, synthetic construct
GSGQNQQTSLQDQT

SEQ ID NO: 289 - protein, 14 aa, synthetic construct
GSGLGRAPVQNQQT

SEQ ID NO: 290 - protein, 14 aa, synthetic construct
GNGFSSASGQNQQT

SEQ ID NO: 291 - protein, 14 aa, synthetic construct
GSGQMASRESNQQT

SEQ ID NO: 292 - protein, 14 aa, synthetic construct
GPGLPNHSGQNQQT

SEQ ID NO: 293 - protein, 14 aa, synthetic construct
GNIQWQGSGQNQQT

SEQ ID NO: 294 - protein, 14 aa, synthetic construct
GMSAHMSSGQNQQT

SEQ ID NO: 295 - protein, 14 aa, synthetic construct
GHSFVNRSGQNQQT

SEQ ID NO: 296 - protein, 14 aa, synthetic construct
GRAVMDHSGQNQQT

SEQ ID NO: 297 - protein, 14 aa, synthetic construct
GALTVMQSGQNQQT

SEQ ID NO: 298 - protein, 14 aa, synthetic construct
GSGQRSPVLPNQQT

SEQ ID NO: 299 - protein, 14 aa, synthetic construct
GSGQNGHLSLKQQT

SEQ ID NO: 300 - protein, 14 aa, synthetic construct
GSLPRGTSDQNQQT

SEQ ID NO: 301 - protein, 14 aa, synthetic construct
GVAGSLVSGQNQQT

SEQ ID NO: 302 - protein, 14 aa, synthetic construct
GRGGIPQSGQNQQT

SEQ ID NO: 303 - protein, 14 aa, synthetic construct
GSGQYASSIPNQQT

SEQ ID NO: 304 - protein, 14 aa, synthetic construct
GTDFGRQSSQNQQT

SEQ ID NO: 305 - protein, 14 aa, synthetic construct
GIFMQTPSGQNQQT

SEQ ID NO: 306 - protein, 14 aa, synthetic construct
GSGQNQQTRLVDLT

SEQ ID NO: 307 - protein, 14 aa, synthetic construct
GTREMPLSGQNQQT

SEQ ID NO: 308 - protein, 14 aa, synthetic construct
GSRLVHVHGQNQQT

SEQ ID NO: 309 - protein, 14 aa, synthetic construct
GSGRLVPNGPNQQT

SEQ ID NO: 310 - protein, 14 aa, synthetic construct
GSGYLRESPQNQQT

SEQ ID NO: 311 - protein, 14 aa, synthetic construct
GARIQNASGQKQQT

SEQ ID NO: 312 - protein, 14 aa, synthetic construct
GLSNPMPSGQNQQT

SEQ ID NO: 313 - protein, 14 aa, synthetic construct
GSTVQDTRGQNQQT

SEQ ID NO: 314 - protein, 14 aa, synthetic construct
GPFGMPSSGQNQQT

SEQ ID NO: 315 - protein, 14 aa, synthetic construct
GSGQNHGVLSNQQT

SEQ ID NO: 316 - protein, 14 aa, synthetic construct
GSGYSMSQAQNQQT

SEQ ID NO: 317 - protein, 14 aa, synthetic construct
GSGMLTHTLQNQQT

SEQ ID NO: 318 - protein, 14 aa, synthetic construct
GRGSPHASRQNQQT

SEQ ID NO: 319 - protein, 14 aa, synthetic construct
GLSWPSTSGQNQQT

SEQ ID NO: 320 - protein, 14 aa, synthetic construct
GNSMERTSGQNQQT

SEQ ID NO: 321 - protein, 14 aa, synthetic construct
GSGMSPSTLQNQQT

SEQ ID NO: 322 - protein, 14 aa, synthetic construct
GSGHGQVLSQNQQT

SEQ ID NO: 323 - protein, 14 aa, synthetic construct
GRGQIYSTGGNQQT

SEQ ID NO: 324 - protein, 14 aa, synthetic construct
GVVAAHNSGQNQQT

SEQ ID NO: 325 - protein, 14 aa, synthetic construct
GDSSLRHSGQNQQT

SEQ ID NO: 326 - protein, 14 aa, synthetic construct
GSLVSQGAGQNQQT

SEQ ID NO: 327 - protein, 14 aa, synthetic construct
GSLLQAHSGQNQQT

SEQ ID NO: 328 - protein, 14 aa, synthetic construct
GSGHIYVGIQNQQT

SEQ ID NO: 329 - protein, 14 aa, synthetic construct
GHHTTVQSGQNQQT

SEQ ID NO: 330 - protein, 14 aa, synthetic construct
GSRQSKRNELNQQT

SEQ ID NO: 331 - protein, 14 aa, synthetic construct
GSGQNQQHVSSPRT

SEQ ID NO: 332 - protein, 14 aa, synthetic construct
GSSKELLWGQNQQT

SEQ ID NO: 333 - protein, 14 aa, synthetic construct
GSLSTPSSGQNQQT

SEQ ID NO: 334 - protein, 14 aa, synthetic construct
GSIGYAGQGQNQQT

SEQ ID NO: 335 - protein, 14 aa, synthetic construct
GSGQNQRVSNSQQT

SEQ ID NO: 336 - protein, 14 aa, synthetic construct
GSGYASHVQQNQQT

SEQ ID NO: 337 - protein, 14 aa, synthetic construct
GSGEYSRSGQNQQT

SEQ ID NO: 338 - protein, 14 aa, synthetic construct
GSVSTHSSGQNQQT

SEQ ID NO: 339 - protein, 14 aa, synthetic construct
GSGQNQHSLGNYQT

SEQ ID NO: 340 - protein, 14 aa, synthetic construct
GSGGLDTRGQNQQT

SEQ ID NO: 341 - protein, 14 aa, synthetic construct
GNILHATSGQNQQT

SEQ ID NO: 342 - protein, 14 aa, synthetic construct
GSGQSYTMTQNQQT

SEQ ID NO: 343 - protein, 14 aa, synthetic construct
GSGQNQHSAPNSQT

SEQ ID NO: 344 - protein, 14 aa, synthetic construct
GSGQNQQTMDHNRT

SEQ ID NO: 345 - protein, 14 aa, synthetic construct
GSNGGVGTGQNQQT

SEQ ID NO: 346 - protein, 14 aa, synthetic construct
GAGSIIPSGQNQQT

SEQ ID NO: 347 - protein, 14 aa, synthetic construct
GSGQTHGGQHNQQT

SEQ ID NO: 348 - protein, 14 aa, synthetic construct
GSNLSFQSGQNQQT

SEQ ID NO: 349 - protein, 14 aa, synthetic construct
GATLQVHSGQNQQT

SEQ ID NO: 350 - protein, 14 aa, synthetic construct
GSGFNQRSEQNQQT

SEQ ID NO: 351 - protein, 14 aa, synthetic construct
GSGSLRDFDQNQQT

SEQ ID NO: 352 - protein, 14 aa, synthetic construct
GSGDSITGKQNQQT

SEQ ID NO: 353 - protein, 14 aa, synthetic construct
GSGQDRNIVQNQQT

SEQ ID NO: 354 - protein, 14 aa, synthetic construct
GSGLSHSHQQNQQT

SEQ ID NO: 355 - protein, 14 aa, synthetic construct
GSGQNQQTGMSSVK

SEQ ID NO: 356 - protein, 14 aa, synthetic construct
GSVTHGISGQNQQT

SEQ ID NO: 357 - protein, 14 aa, synthetic construct
GVVAHQPSGQNQQT

SEQ ID NO: 358 - protein, 14 aa, synthetic construct
GSGPILGQLQNQQT

SEQ ID NO: 359 - protein, 14 aa, synthetic construct
GSGHVPNSGLNQQT

SEQ ID NO: 360 - protein, 14 aa, synthetic construct
GDAGVRSSGQNQQT

SEQ ID NO: 361 - protein, 14 aa, synthetic construct
GSGSQLMSLQNQQT

SEQ ID NO: 362 - protein, 14 aa, synthetic construct
GSGLDYSQRQNQQT

SEQ ID NO: 363 - protein, 14 aa, synthetic construct
GSGQSSGRLINKQT

SEQ ID NO: 364 - protein, 14 aa, synthetic construct
GSSVSPSSGQNQQT

SEQ ID NO: 365 - protein, 14 aa, synthetic construct
GSGQVVGLSGNQQT

SEQ ID NO: 366 - protein, 14 aa, synthetic construct
GSNMGVPLGQNQQT

SEQ ID NO: 367 - protein, 14 aa, synthetic construct
GSFYPSSTGQNQQT

SEQ ID NO: 368 - protein, 14 aa, synthetic construct
GSGQNQQTRLTDLT

SEQ ID NO: 369 - protein, 14 aa, synthetic construct
GPTNGRSSGQNQQT

SEQ ID NO: 370 - protein, 14 aa, synthetic construct
GSGLLHGKLQNQQT

SEQ ID NO: 371 - protein, 14 aa, synthetic construct
GANMGHVSGQNQQT

SEQ ID NO: 372 - protein, 14 aa, synthetic construct
GSGQNQQSGRGDLT

SEQ ID NO: 373 - protein, 14 aa, synthetic construct
GSHGHYASGQKQQT

SEQ ID NO: 374 - protein, 14 aa, synthetic construct
GSGDLRISPQNQQT

SEQ ID NO: 375 - protein, 14 aa, synthetic construct
GSGMPVILGQNQQT

SEQ ID NO: 376 - protein, 14 aa, synthetic construct
GRGVITSSGQNHQT

SEQ ID NO: 377 - protein, 14 aa, synthetic construct
GSGHSVSGPQNQQT

SEQ ID NO: 378 - protein, 14 aa, synthetic construct
GSRNGHTVGRNQQT

SEQ ID NO: 379 - protein, 14 aa, synthetic construct
GAGVHMVSGQNQQT

SEQ ID NO: 380 - protein, 14 aa, synthetic construct
GSGQNHRPSVLQQT

SEQ ID NO: 381 - protein, 14 aa, synthetic construct
GSGSPRDSIQNQQT

SEQ ID NO: 382 - protein, 14 aa, synthetic construct
GSGQGIHSSVNQQT

SEQ ID NO: 383 - protein, 14 aa, synthetic construct
GSGQQLSITPNQQT

SEQ ID NO: 384 - protein, 14 aa, synthetic construct
GGYHSQTSGQNQQT

SEQ ID NO: 385 - protein, 14 aa, synthetic construct
GSLHHDNHGQNQQT

SEQ ID NO: 386 - protein, 14 aa, synthetic construct
GIMARDSSGQNQQT

SEQ ID NO: 387 - protein, 14 aa, synthetic construct
GVVHITNSGQNQQT

SEQ ID NO: 388 - protein, 14 aa, synthetic construct
GSGQNQHSAPFNQT

SEQ ID NO: 389 - protein, 14 aa, synthetic construct
GSGQTSGLKQNQQT

SEQ ID NO: 390 - protein, 14 aa, synthetic construct
GSGQNQQTSLSNTA

SEQ ID NO: 391 - protein, 14 aa, synthetic construct
GSGQNQAVHNKSQT

SEQ ID NO: 392 - protein, 14 aa, synthetic construct
GVHTHLPSGQNQQT

SEQ ID NO: 393 - protein, 14 aa, synthetic construct
GHLTMHNSGQNHQT

SEQ ID NO: 394 - protein, 14 aa, synthetic construct
GSGSSSRPYQNQQT

SEQ ID NO: 395 - protein, 14 aa, synthetic construct
GILLATPSGQNQQT

SEQ ID NO: 396 - protein, 14 aa, synthetic construct
GSGQNAGSFPNQQT

SEQ ID NO: 397 - protein, 14 aa, synthetic construct
GSRDGHTVGQNQQT

SEQ ID NO: 398 - protein, 14 aa, synthetic construct
GSLLISTSGQNQQT

SEQ ID NO: 399 - protein, 14 aa, synthetic construct
GSGAMPSHGQNQQT

SEQ ID NO: 400 - protein, 14 aa, synthetic construct
GALVSPISGQNQQT

SEQ ID NO: 401 - protein, 14 aa, synthetic construct
GSLSSHGVGQNQQT

SEQ ID NO: 402 - protein, 14 aa, synthetic construct
GSGQNQQASLAMRT

SEQ ID NO: 403 - protein, 14 aa, synthetic construct
GPGLGSHSGQNQQT

SEQ ID NO: 404 - protein, 14 aa, synthetic construct
GHDSQHKSGQNQQT

SEQ ID NO: 405 - protein, 14 aa, synthetic construct
GSGLTLSATQNQQT

SEQ ID NO: 406 - protein, 14 aa, synthetic construct
GSGQVVAHVGNQQT

SEQ ID NO: 407 - protein, 14 aa, synthetic construct
GSGLRTMTTQNQQT

SEQ ID NO: 408 - protein, 14 aa, synthetic construct
GSGQVGRLLQNQQT

SEQ ID NO: 409 - protein, 14 aa, synthetic construct
GSGQLSHQSVNQQT

SEQ ID NO: 410 - protein, 14 aa, synthetic construct
GSGDRYQTLQNQQT

SEQ ID NO: 411 - protein, 14 aa, synthetic construct
GSGQNQQLKSSAQT

SEQ ID NO: 412 - protein, 14 aa, synthetic construct
GSGQNQYSIPVAQT

SEQ ID NO: 413 - protein, 14 aa, synthetic construct
GSGERLHLTQNQQT

SEQ ID NO: 414 - protein, 14 aa, synthetic construct
GSGHNQQVRTAPNT

SEQ ID NO: 415 - protein, 14 aa, synthetic construct
GGLSHVMSGQNQQT

SEQ ID NO: 416 - protein, 14 aa, synthetic construct
GSGQSHRDVLNQQT

SEQ ID NO: 417 - protein, 14 aa, synthetic construct
GSGQNLAGRMDQQT

SEQ ID NO: 418 - protein, 14 aa, synthetic construct
GSGQNQQTNRGNPM

SEQ ID NO: 419 - protein, 14 aa, synthetic construct
GSGQSYQRDHNQQT

SEQ ID NO: 420 - protein, 14 aa, synthetic construct
GSLLSAGMGQNQHT

SEQ ID NO: 421 - protein, 14 aa, synthetic construct
GSGQNQQTAIYRNI

SEQ ID NO: 422 - protein, 14 aa, synthetic construct
GSGQNQQTSGTTNC

SEQ ID NO: 423 - protein, 14 aa, synthetic construct
GMTSHSVSGQNQQT

SEQ ID NO: 424 - protein, 14 aa, synthetic construct
GSSQSTGYQPNQQT

SEQ ID NO: 425 - protein, 14 aa, synthetic construct
GSLKPTTLGQNQQT

SEQ ID NO: 426 - protein, 14 aa, synthetic construct
GRMFSLGSGQNQQT

SEQ ID NO: 427 - protein, 14 aa, synthetic construct
GSGQNQQTALGVKC

SEQ ID NO: 428 - protein, 14 aa, synthetic construct
GAMVSHSSGQNQQT

SEQ ID NO: 429 - protein, 14 aa, synthetic construct
GSGQNQQRNSDSVT

SEQ ID NO: 430 - protein, 14 aa, synthetic construct
GSGQSMTLHLNQQT

SEQ ID NO: 431 - protein, 14 aa, synthetic construct
GSGQVHQAEVNQQT

SEQ ID NO: 432 - protein, 14 aa, synthetic construct
GSGQNQSQNHLQQT

SEQ ID NO: 433 - protein, 14 aa, synthetic construct
GSLLTTASGQNQQT

SEQ ID NO: 434 - protein, 14 aa, synthetic construct
GSGLIRTAAQNQQT

SEQ ID NO: 435 - protein, 14 aa, synthetic construct
GSGQNQQTVSRQST

SEQ ID NO: 436 - protein, 14 aa, synthetic construct
GSGQYANHGINQQT

SEQ ID NO: 437 - protein, 14 aa, synthetic construct
GSRSTGPSGQNQQT

SEQ ID NO: 438 - protein, 14 aa, synthetic construct
GRGVQQKLQQNQQT

SEQ ID NO: 439 - protein, 14 aa, synthetic construct
GSGQNQQVHLSTGT

SEQ ID NO: 440 - protein, 14 aa, synthetic construct
GSGQNQQLSAKSST

SEQ ID NO: 441 - protein, 14 aa, synthetic construct
GSGYKAARPQNQQT

SEQ ID NO: 442 - protein, 14 aa, synthetic construct
GSAGISPSGQNQQT

SEQ ID NO: 443 - protein, 14 aa, synthetic construct
GSGQNRAHAFLQQT

SEQ ID NO: 444 - protein, 14 aa, synthetic construct
GSGLSGITMQNQQT

SEQ ID NO: 445 - protein, 14 aa, synthetic construct
GPGSAHSSGQNQQT

SEQ ID NO: 446 - protein, 14 aa, synthetic construct
GSSHTQALGQNQQT

SEQ ID NO: 447 - protein, 14 aa, synthetic construct
GSGVHGVSSQNQQT

SEQ ID NO: 448 - protein, 14 aa, synthetic construct
GSSGRDMGGQNQQT

SEQ ID NO: 449 - protein, 14 aa, synthetic construct
GERAFPTSGQNQQT

SEQ ID NO: 450 - protein, 14 aa, synthetic construct
GGRIVSLSGQNQQT

SEQ ID NO: 451 - protein, 14 aa, synthetic construct
GSGQNSYSHTSQQT

SEQ ID NO: 452 - protein, 14 aa, synthetic construct
GLGYPGSSGQNQQT

SEQ ID NO: 453 - protein, 14 aa, synthetic construct
GSGPQSHTGQNQQT

SEQ ID NO: 454 - protein, 14 aa, synthetic construct
GSGQNQQLSRDAST

SEQ ID NO: 455 - protein, 14 aa, synthetic construct
GSGQILHSVPNQQT

SEQ ID NO: 456 - protein, 14 aa, synthetic construct
GSGFHTDSRQNQQT

SEQ ID NO: 457 - protein, 14 aa, synthetic construct
GSGQSHSLATNQQT

SEQ ID NO: 458 - protein, 14 aa, synthetic construct
GSGQNQQTLSKPWT

SEQ ID NO: 459 - protein, 14 aa, synthetic construct
GSGHAAISQQNQQT

SEQ ID NO: 460 - protein, 14 aa, synthetic construct
GSGQNQQQIGGNST

SEQ ID NO: 461 - protein, 14 aa, synthetic construct
GGGPMAGSGQNQQT

SEQ ID NO: 462 - protein, 14 aa, synthetic construct
GMRMEYQSGQNQQT

SEQ ID NO: 463 - protein, 14 aa, synthetic construct
GSGQNQQGTLLHQT

SEQ ID NO: 464 - protein, 14 aa, synthetic construct
GSGQNQRSSGGVQT

SEQ ID NO: 465 - protein, 14 aa, synthetic construct
GSGQNQRGALATQT

SEQ ID NO: 466 - protein, 14 aa, synthetic construct
GSGTVHAATQNQQT

SEQ ID NO: 467 - protein, 14 aa, synthetic construct
GSRMTQQFGQNQQT

SEQ ID NO: 468 - protein, 14 aa, synthetic construct
GSSSPGASGQNQQT

SEQ ID NO: 469 - protein, 14 aa, synthetic construct
GHPSPHVSGQNQQT

SEQ ID NO: 470 - protein, 14 aa, synthetic construct
GSGSHHASRQNQQT

SEQ ID NO: 471 - protein, 14 aa, synthetic construct
GAVGHSYSGQNQQT

SEQ ID NO: 472 - protein, 14 aa, synthetic construct
GSRSQYDIGQNQQT

SEQ ID NO: 473 - protein, 14 aa, synthetic construct
GSGQGPQERGNQQT

SEQ ID NO: 474 - protein, 14 aa, synthetic construct
GSIAHVGTGQNQQT

SEQ ID NO: 475 - protein, 14 aa, synthetic construct
GSGQNQQKQNHGNT

SEQ ID NO: 476 - protein, 14 aa, synthetic construct
GSGQNQQALGSQRT

SEQ ID NO: 477 - protein, 14 aa, synthetic construct
GSGAITHMPQNQQT

SEQ ID NO: 478 - protein, 14 aa, synthetic construct
GSGQRNPLLLNQQT

SEQ ID NO: 479 - protein, 14 aa, synthetic construct
GSSGIPVSHQNQQT

SEQ ID NO: 480 - protein, 14 aa, synthetic construct
GVHSLTPSGQNQQT

SEQ ID NO: 481 - protein, 14 aa, synthetic construct
GVIVLHGSGQNQQT

SEQ ID NO: 482 - protein, 14 aa, synthetic construct
GGTRVVDSGQNQQT

SEQ ID NO: 483 - protein, 14 aa, synthetic construct
GSGGVTYQSQNQQT

SEQ ID NO: 484 - protein, 14 aa, synthetic construct
GSGQNQAGHGPGQT

SEQ ID NO: 485 - protein, 14 aa, synthetic construct
GSGQLVTSGPNQQT

SEQ ID NO: 486 - protein, 14 aa, synthetic construct
GSGIAAQRTQNQQT

SEQ ID NO: 487 - protein, 14 aa, synthetic construct
GSTPAGVGGQNQQT

SEQ ID NO: 488 - protein, 14 aa, synthetic construct
GSGQNQQTSTGVHS

SEQ ID NO: 489 - protein, 14 aa, synthetic construct
GSGQIRQLVDNQQT

SEQ ID NO: 490 - protein, 14 aa, synthetic construct
GSLIGMQSGQNQQT

SEQ ID NO: 491 - protein, 14 aa, synthetic construct
GSGQIKGKMDNQQT

SEQ ID NO: 492 - protein, 14 aa, synthetic construct
GSGSDMSSWQNQQT

SEQ ID NO: 493 - protein, 14 aa, synthetic construct
GRGQNQQHTGLATT

SEQ ID NO: 494 - protein, 14 aa, synthetic construct
GSGQNQQTLYSSNT

SEQ ID NO: 495 - protein, 14 aa, synthetic construct
GSGQTQVLKSNQQT

SEQ ID NO: 496 - protein, 14 aa, synthetic construct
GSRTLSNVGQNQQT

SEQ ID NO: 497 - protein, 14 aa, synthetic construct
GSGVQHSLPQNQQT

SEQ ID NO: 498 - protein, 14 aa, synthetic construct
GNYLHQASGQNQQT

SEQ ID NO: 499 - protein, 14 aa, synthetic construct
GSGGTSVHQQNQQT

SEQ ID NO: 500 - protein, 14 aa, synthetic construct
GMDHSRPSGQNQQT

SEQ ID NO: 501 - protein, 14 aa, synthetic construct
GSGQNQQSMGTFTT

SEQ ID NO: 502 - protein, 14 aa, synthetic construct
GSGQNQQTPLRPPT

SEQ ID NO: 503 - protein, 14 aa, synthetic construct
GSGQNQHHSVSQQT

SEQ ID NO: 504 - protein, 14 aa, synthetic construct
GSGQLRSLSTNQQT

SEQ ID NO: 505 - protein, 14 aa, synthetic construct
GSGSPRQLSQNQQT

SEQ ID NO: 506 - protein, 14 aa, synthetic construct
GSGQNQQTTASSHT

SEQ ID NO: 507 - protein, 14 aa, synthetic construct
GRGQVVSTHQNQQT

SEQ ID NO: 508 - protein, 14 aa, synthetic construct
GSAQVSMVGQNQQT

SEQ ID NO: 509 - protein, 14 aa, synthetic construct
GSSTLVTIGKNQQT

SEQ ID NO: 510 - protein, 14 aa, synthetic construct
GFAHQASSGQNQQT

SEQ ID NO: 511 - protein, 14 aa, synthetic construct
GSGQPVLSISNQQT

SEQ ID NO: 512 - protein, 14 aa, synthetic construct
GSGQSHRSELNQQT

SEQ ID NO: 513 - protein, 14 aa, synthetic construct
GSSVGSPIGQNQQT

SEQ ID NO: 514 - protein, 14 aa, synthetic construct
GSGMPIRNVQNQQT

SEQ ID NO: 515 - protein, 14 aa, synthetic construct
GSSTRVDSGQNQQT

SEQ ID NO: 516 - protein, 14 aa, synthetic construct
GSGQNQQTAMRSTT

SEQ ID NO: 517 - protein, 14 aa, synthetic construct
GSGQNQQHSSSHLT

SEQ ID NO: 518 - protein, 14 aa, synthetic construct
GSRNGHAVGQNQQT

SEQ ID NO: 519 - protein, 14 aa, synthetic construct
GLGAYQSSGQNQQT

SEQ ID NO: 520 - protein, 14 aa, synthetic construct
GPGLSGHSGQNQQT

SEQ ID NO: 521 - protein, 14 aa, synthetic construct
GSTGIVSSGQNQQT

SEQ ID NO: 522 - protein, 14 aa, synthetic construct
GSRTTQVIGQNQQT

SEQ ID NO: 523 - protein, 14 aa, synthetic construct
GSGLLHRAQQNQQT

SEQ ID NO: 524 - protein, 14 aa, synthetic construct
GSGQNAQQAAAQQT

SEQ ID NO: 525 - protein, 14 aa, synthetic construct
GSGQNQQSALRTQT

SEQ ID NO: 526 - protein, 14 aa, synthetic construct
GSGFLSDTRQNQQT

SEQ ID NO: 527 - protein, 14 aa, synthetic construct
GSGLLYHDQQNQQT

SEQ ID NO: 528 - protein, 14 aa, synthetic construct
GSGQNQHYSLHKQT

SEQ ID NO: 529 - protein, 14 aa, synthetic construct
GSGHSPLPQQNQQT

SEQ ID NO: 530 - protein, 14 aa, synthetic construct
GNGHSMRPNQNQQT

SEQ ID NO: 531 - protein, 14 aa, synthetic construct
GSGLKWSTLQNQQT

SEQ ID NO: 532 - protein, 14 aa, synthetic construct
GSGQMGRQAVNQQT

SEQ ID NO: 533 - protein, 14 aa, synthetic construct
GSGQNQQTSGVLTL

SEQ ID NO: 534 - protein, 14 aa, synthetic construct
GSGQNQQALHNPHT

SEQ ID NO: 535 - protein, 14 aa, synthetic construct
GSGQNQQVIPNSKT

SEQ ID NO: 536 - protein, 14 aa, synthetic construct
GSPLQDRVGQNQQT

SEQ ID NO: 537 - protein, 14 aa, synthetic construct
GSGQNQYSSTNPQT

SEQ ID NO: 538 - protein, 14 aa, synthetic construct
GAMTVTISGQNQQT

SEQ ID NO: 539 - protein, 14 aa, synthetic construct
GSGQNQQLQTLIRT

SEQ ID NO: 540 - protein, 14 aa, synthetic construct
GSGLRQTSQQNQQT

SEQ ID NO: 541 - protein, 14 aa, synthetic construct
GSGQNQQTGLRQQT

SEQ ID NO: 542 - protein, 14 aa, synthetic construct
GSGQTRQMKDNQQT

SEQ ID NO: 543 - protein, 14 aa, synthetic construct
GSGQNHGLQSGQQT

SEQ ID NO: 544 - protein, 14 aa, synthetic construct
GSGQSHRQPENQQT

SEQ ID NO: 545 - protein, 14 aa, synthetic construct
GSGQDRHIVQNQQT

SEQ ID NO: 546 - protein, 14 aa, synthetic construct
GSGQNQQLPHSNLT

SEQ ID NO: 547 - protein, 14 aa, synthetic construct
GSGQLSVPYDNQQT

SEQ ID NO: 548 - protein, 14 aa, synthetic construct
GSGRNPQTQPLQQT

SEQ ID NO: 549 - protein, 14 aa, synthetic construct
GSGQPYSTGLNQQT

SEQ ID NO: 550 - protein, 14 aa, synthetic construct
GSGQNQQTHGGLRD

SEQ ID NO: 551 - protein, 14 aa, synthetic construct
GAYGMVSSGQNQQT

SEQ ID NO: 552 - protein, 14 aa, synthetic construct
GSGIQSSYSQNQQT

SEQ ID NO: 553 - protein, 14 aa, synthetic construct
GPRLSDQSGQNQQT

SEQ ID NO: 554 - protein, 14 aa, synthetic construct
GSGQNQQTHPSPCT

SEQ ID NO: 555 - protein, 14 aa, synthetic construct
GSGQSFQMHTNQQT

SEQ ID NO: 556 - protein, 14 aa, synthetic construct
GSGQNQQTGNPKHT

SEQ ID NO: 557 - protein, 14 aa, synthetic construct
GFSSAVHSGQNQQT

SEQ ID NO: 558 - protein, 14 aa, synthetic construct
GSGQNQQTSMSNAT

SEQ ID NO: 559 - protein, 14 aa, synthetic construct
GSGQDMKQHHNQQT

SEQ ID NO: 560 - protein, 14 aa, synthetic construct
GLRLSTPSGQNQQT

SEQ ID NO: 561 - protein, 14 aa, synthetic construct
GSGQNQQTSVYMNT

SEQ ID NO: 562 - protein, 14 aa, synthetic construct
GSGQNQYSQSSMQT

SEQ ID NO: 563 - protein, 14 aa, synthetic construct
GSGQNQQSMADHTT

SEQ ID NO: 564 - protein, 14 aa, synthetic construct
GWERSFVSGQNQQT

SEQ ID NO: 565 - protein, 14 aa, synthetic construct
GLLAGKSSGQNQQT

SEQ ID NO: 566 - protein, 14 aa, synthetic construct
GKSFVPQSGQNQQT

SEQ ID NO: 567 - protein, 14 aa, synthetic construct
GSGQMQSAGSNQQT

SEQ ID NO: 568 - protein, 14 aa, synthetic construct
GSDQNQRLTSSMQT

SEQ ID NO: 569 - protein, 14 aa, synthetic construct
GESRAVLSGQNQQT

SEQ ID NO: 570 - protein, 14 aa, synthetic construct
GSVFGVPSGQNQQT

SEQ ID NO: 571 - protein, 14 aa, synthetic construct
GSGLPDRNLQNQQT

SEQ ID NO: 572 - protein, 14 aa, synthetic construct
GSGTHNSAIQNQQT

SEQ ID NO: 573 - protein, 14 aa, synthetic construct
GSGMIIASMQNQQT

SEQ ID NO: 574 - protein, 14 aa, synthetic construct
GGITWTDSGQNQQT

SEQ ID NO: 575 - protein, 14 aa, synthetic construct
GSGQNQQASGRQQT

SEQ ID NO: 576 - protein, 14 aa, synthetic construct
GSGQNQQPHLKSLT

SEQ ID NO: 577 - protein, 14 aa, synthetic construct
GPPQHMTSGQNQQT

SEQ ID NO: 578 - protein, 14 aa, synthetic construct
GSGQNQQASLPSRT

SEQ ID NO: 579 - protein, 14 aa, synthetic construct
GSGQIVSTQTNQQT

SEQ ID NO: 580 - protein, 14 aa, synthetic construct
GSGKGHSAGQNQQT

SEQ ID NO: 581 - protein, 14 aa, synthetic construct
GSGQNTRLQLGQQT

SEQ ID NO: 582 - protein, 14 aa, synthetic construct
GSVGSRPVGQNQQT

SEQ ID NO: 583 - protein, 14 aa, synthetic construct
GSSHTLALGQNQQT

SEQ ID NO: 584 - protein, 14 aa, synthetic construct
GMYEYSQSGQNQQT

SEQ ID NO: 585 - protein, 14 aa, synthetic construct
GNGQNQQHSILHGT

SEQ ID NO: 586 - protein, 14 aa, synthetic construct
GSGYNQPHLQNQQT

SEQ ID NO: 587 - protein, 14 aa, synthetic construct
GPLVNASSGQNQQT

SEQ ID NO: 588 - protein, 14 aa, synthetic construct
GSGQNQQVLTTART

SEQ ID NO: 589 - protein, 14 aa, synthetic construct
GSGQNQHSVHNDQT

SEQ ID NO: 590 - protein, 14 aa, synthetic construct
GAGLIMHSGQNQQT

SEQ ID NO: 591 - protein, 14 aa, synthetic construct
GMGRHSASGQNQQT

SEQ ID NO: 592 - protein, 14 aa, synthetic construct
GSHSQSGHGQNQQT

SEQ ID NO: 593 - protein, 14 aa, synthetic construct
GSSTTIVSGQNHQT

SEQ ID NO: 594 - protein, 14 aa, synthetic construct
GRHLVTASGQNQQT

SEQ ID NO: 595 - protein, 14 aa, synthetic construct
GSGQNQQHANLNQT

SEQ ID NO: 596 - protein, 14 aa, synthetic construct
GSGSTHSKAQNQQT

SEQ ID NO: 597 - protein, 14 aa, synthetic construct
GSGQNKQMLSGNTT

SEQ ID NO: 598 - protein, 14 aa, synthetic construct
GSGQVHNPTQNQQT

SEQ ID NO: 599 - protein, 14 aa, synthetic construct
GSGQNQQIPHVHQT

SEQ ID NO: 600 - protein, 14 aa, synthetic construct
GSLHAGLSGQNQQT

SEQ ID NO: 601 - protein, 14 aa, synthetic construct
GPAQHGTSGQNQQT

SEQ ID NO: 602 - protein, 14 aa, synthetic construct
GEKAVTSSGQNQQT

SEQ ID NO: 603 - protein, 14 aa, synthetic construct
GSGQNQQTMANGQR

SEQ ID NO: 604 - protein, 14 aa, synthetic construct
GSGSPHSKDQNQQT

SEQ ID NO: 605 - protein, 14 aa, synthetic construct
GSFSMGYGGQNQQT

SEQ ID NO: 606 - protein, 14 aa, synthetic construct
GSGTHLVSLQNQQT

SEQ ID NO: 607 - protein, 14 aa, synthetic construct
GSGQMQPHVQNQQT

SEQ ID NO: 608 - protein, 14 aa, synthetic construct
GSGQNQQVAGLNNT

SEQ ID NO: 609 - protein, 14 aa, synthetic construct
GSSQNQQHDMRLRT

SEQ ID NO: 610 - protein, 14 aa, synthetic construct
GPASLPISGQNQQT

SEQ ID NO: 611 - protein, 14 aa, synthetic construct
GSGQNQQPPLATRT

SEQ ID NO: 612 - protein, 14 aa, synthetic construct
GSSRVPVSGQNQQT

SEQ ID NO: 613 - protein, 14 aa, synthetic construct
GSGQNQQTNLGHTT

SEQ ID NO: 614 - protein, 14 aa, synthetic construct
GSGQNQQLVSRVQT

SEQ ID NO: 615 - protein, 14 aa, synthetic construct
GPNSYPVSGQKQQT

SEQ ID NO: 616 - protein, 14 aa, synthetic construct
GHAHYQASGQNQQT

SEQ ID NO: 617 - protein, 14 aa, synthetic construct
GSGQALLSTGNQQT

SEQ ID NO: 618 - protein, 14 aa, synthetic construct
GSGQLPRQMTNQQT

SEQ ID NO: 619 - protein, 14 aa, synthetic construct
GSGFPKSTEQNQQT

SEQ ID NO: 620 - protein, 14 aa, synthetic construct
GSRETSLSGQNQQT

SEQ ID NO: 621 - protein, 14 aa, synthetic construct
GSGQNQQGTGVSHT

SEQ ID NO: 622 - protein, 14 aa, synthetic construct
GSRTVPVYGQNQQT

SEQ ID NO: 623 - protein, 14 aa, synthetic construct
GSNAQSAHGQNQQT

SEQ ID NO: 624 - protein, 14 aa, synthetic construct
GAFHLAASGQNQQT

SEQ ID NO: 625 - protein, 14 aa, synthetic construct
GSGQYRSSSDNQQT

SEQ ID NO: 626 - protein, 14 aa, synthetic construct
GSGQVYISTPNQQT

SEQ ID NO: 627 - protein, 14 aa, synthetic construct
GSGVSTQLLQNQQT

SEQ ID NO: 628 - protein, 14 aa, synthetic construct
GSGQLGLSVTNQQT

SEQ ID NO: 629 - protein, 14 aa, synthetic construct
GSGSNMRLSQNQQT

SEQ ID NO: 630 - protein, 14 aa, synthetic construct
GSGQNLHSGLPQQT

SEQ ID NO: 631 - protein, 14 aa, synthetic construct
GSSHTLALGQNKQT

SEQ ID NO: 632 - protein, 14 aa, synthetic construct
GSGQNQHSLPAHRT

SEQ ID NO: 633 - protein, 14 aa, synthetic construct
GSGQNQGTVYPNQT

SEQ ID NO: 634 - protein, 14 aa, synthetic construct
GSGQNQQPSLRQST

SEQ ID NO: 635 - protein, 14 aa, synthetic construct
GSGQNARLKDNQQT

SEQ ID NO: 636 - protein, 14 aa, synthetic construct
GHAGSTGSGQNQQT

SEQ ID NO: 637 - protein, 14 aa, synthetic construct
GSGQALSSSGNQQT

SEQ ID NO: 638 - protein, 14 aa, synthetic construct
GSGASESHRQNQQT

SEQ ID NO: 639 - protein, 14 aa, synthetic construct
GVGVITSSGQNQQT

SEQ ID NO: 640 - protein, 14 aa, synthetic construct
GSLYGQSLGQNQQT

SEQ ID NO: 641 - protein, 14 aa, synthetic construct
GSGQMSDVHGNQQT

SEQ ID NO: 642 - protein, 14 aa, synthetic construct
GSGQNQQHSSKATT

SEQ ID NO: 643 - protein, 14 aa, synthetic construct
GSGQNQQTSVSQQT

SEQ ID NO: 644 - protein, 14 aa, synthetic construct
GSGQKMWKLDNQQT

SEQ ID NO: 645 - protein, 14 aa, synthetic construct
GSGQNVSMQVNQQT

SEQ ID NO: 646 - protein, 14 aa, synthetic construct
GSGQNQRATLSNQT

SEQ ID NO: 647 - protein, 14 aa, synthetic construct
GSGQASSKSANQQT

SEQ ID NO: 648 - protein, 14 aa, synthetic construct
GSGKNQTPIPKGQT

SEQ ID NO: 649 - protein, 14 aa, synthetic construct
GSGQNQQTRQEGST

SEQ ID NO: 650 - protein, 14 aa, synthetic construct
GASSLATSGQNQQT

SEQ ID NO: 651 - protein, 14 aa, synthetic construct
GSGQRGSLTENQQT

SEQ ID NO: 652 - protein, 14 aa, synthetic construct
GSEQTRQRGQNQQT

SEQ ID NO: 653 - protein, 14 aa, synthetic construct
GSGQNQQTLTASKE

SEQ ID NO: 654 - protein, 14 aa, synthetic construct
GSGTSGKTGKNQQT

SEQ ID NO: 655 - protein, 14 aa, synthetic construct
GQLVTFTSGQNQQT

SEQ ID NO: 656 - protein, 14 aa, synthetic construct
GSGQNQQSANKILT

SEQ ID NO: 657 - protein, 14 aa, synthetic construct
GSGQNQQHHSSHTT

SEQ ID NO: 658 - protein, 14 aa, synthetic construct
GSGQNQKGMQPNQT

SEQ ID NO: 659 - protein, 14 aa, synthetic construct
GSGQLVSGLYNQQT

SEQ ID NO: 660 - protein, 14 aa, synthetic construct
GSSVGVPSGQNQQT

SEQ ID NO: 661 - protein, 14 aa, synthetic construct
GSGQNQQWDSRRQT

SEQ ID NO: 662 - protein, 14 aa, synthetic construct
GSEQTRQSGQNQQT

SEQ ID NO: 663 - protein, 14 aa, synthetic construct
GSGIGSHIPQNQQT

SEQ ID NO: 664 - protein, 14 aa, synthetic construct
GSGQNQRLHGVDQT

SEQ ID NO: 665 - protein, 14 aa, synthetic construct
GEVSRVLSGQNQQT

SEQ ID NO: 666 - protein, 14 aa, synthetic construct
GSGQNQQKVSPLLT

SEQ ID NO: 667 - protein, 14 aa, synthetic construct
GSGLALERSQNQQT

SEQ ID NO: 668 - protein, 14 aa, synthetic construct
GPDRIGSSGQNQQT

SEQ ID NO: 669 - protein, 14 aa, synthetic construct
GSGQNQDHQNKQQT

SEQ ID NO: 670 - protein, 14 aa, synthetic construct
GSGQNQQTALYNNT

SEQ ID NO: 671 - protein, 14 aa, synthetic construct
GSGAVHLTAQNQQT

SEQ ID NO: 672 - protein, 14 aa, synthetic construct
GSLVSTQSGQNQQT

SEQ ID NO: 673 - protein, 14 aa, synthetic construct
GSGVSARMVQNQQT

SEQ ID NO: 674 - protein, 14 aa, synthetic construct
GSGQTRMPLANQQT

SEQ ID NO: 675 - protein, 14 aa, synthetic construct
GSGISSRNMQNQQT

SEQ ID NO: 676 - protein, 14 aa, synthetic construct
GSGEKVHSGQNQQT

SEQ ID NO: 677 - protein, 14 aa, synthetic construct
GSGQNQQKLSSMST

SEQ ID NO: 678 - protein, 14 aa, synthetic construct
GSGQNQQTGQHMRV

SEQ ID NO: 679 - protein, 14 aa, synthetic construct
GSGMIHTTAQNQQT

SEQ ID NO: 680 - protein, 14 aa, synthetic construct
GSGQNWPALKGQQT

SEQ ID NO: 681 - protein, 14 aa, synthetic construct
GASHMSISGQNQQT

SEQ ID NO: 682 - protein, 14 aa, synthetic construct
GSDQNQQLGYSKQT

SEQ ID NO: 683 - protein, 14 aa, synthetic construct
GIPSIRESGQNQQT

SEQ ID NO: 684 - protein, 14 aa, synthetic construct
GSGIPSVKFQNQQT

SEQ ID NO: 685 - protein, 14 aa, synthetic construct
GSGQNQQTSVSQNV

SEQ ID NO: 686 - protein, 14 aa, synthetic construct
GSGQNQQIGESRMT

SEQ ID NO: 687 - protein, 14 aa, synthetic construct
GSGSSSMSFQNQQT

SEQ ID NO: 688 - protein, 14 aa, synthetic construct
GSGQKQERAVSKQT

SEQ ID NO: 689 - protein, 14 aa, synthetic construct
GCTTRLNSGQNQQT

SEQ ID NO: 690 - protein, 14 aa, synthetic construct
GSGQNQQIISTKIT

SEQ ID NO: 691 - protein, 14 aa, synthetic construct
GSGQNQQKSLNGNT

SEQ ID NO: 692 - protein, 14 aa, synthetic construct
GSGIPAPRLQNQQT

SEQ ID NO: 693 - protein, 14 aa, synthetic construct
GSGQIRESMGNQQT

SEQ ID NO: 694 - protein, 14 aa, synthetic construct
GSGQNSGVHFNQQT

SEQ ID NO: 695 - protein, 14 aa, synthetic construct
GSGQNIGHSLPQQT

SEQ ID NO: 696 - protein, 14 aa, synthetic construct
GSGERSISVQNQQT

SEQ ID NO: 697 - protein, 14 aa, synthetic construct
GSGLKPNVLQNQQT

SEQ ID NO: 698 - protein, 14 aa, synthetic construct
GSGQVAYAQGNQQT

SEQ ID NO: 699 - protein, 14 aa, synthetic construct
GSGQSSYGSGNQQT

SEQ ID NO: 700 - protein, 14 aa, synthetic construct
GSGQNQAMTHGDQT

SEQ ID NO: 701 - protein, 14 aa, synthetic construct
GSGQNQALVSMGQT

SEQ ID NO: 702 - protein, 14 aa, synthetic construct
GSGQNPSFMRGQQT

SEQ ID NO: 703 - protein, 14 aa, synthetic construct
GSGQNQQSHLRTNT

SEQ ID NO: 704 - protein, 14 aa, synthetic construct
GYTRLETSGQNQQT

SEQ ID NO: 705 - protein, 14 aa, synthetic construct
GSGQSYDMRGNQQT

SEQ ID NO: 706 - protein, 14 aa, synthetic construct
GSRTTQDIGQNQQT

SEQ ID NO: 707 - protein, 14 aa, synthetic construct
GSGHPYKAAQNQQT

SEQ ID NO: 708 - protein, 14 aa, synthetic construct
GRLSNAHGGQNQQT

SEQ ID NO: 709 - protein, 14 aa, synthetic construct
GSGQNQRAVLNDQT

SEQ ID NO: 710 - protein, 14 aa, synthetic construct
GGSHTYGGGQNQQT

SEQ ID NO: 711 - protein, 14 aa, synthetic construct
GSSVNSMIGQNQQT

SEQ ID NO: 712 - protein, 14 aa, synthetic construct
GNSSMMGSGQNQQT

SEQ ID NO: 713 - protein, 14 aa, synthetic construct
GNRDRPSSGQNQQT

SEQ ID NO: 714 - protein, 14 aa, synthetic construct
GSGNMHASRQNQQT

SEQ ID NO: 715 - protein, 14 aa, synthetic construct
GFIFPKVSGQNQQT

SEQ ID NO: 716 - protein, 14 aa, synthetic construct
GSGQNQQLKNSTST

SEQ ID NO: 717 - protein, 14 aa, synthetic construct
GSGQNQQSQYMPRT

SEQ ID NO: 718 - protein, 14 aa, synthetic construct
GSGQRMADIGNQQT

SEQ ID NO: 719 - protein, 14 aa, synthetic construct
GSGQNQSHYPSQQT

SEQ ID NO: 720 - protein, 14 aa, synthetic construct
GSDGKMHRGQNQQT

SEQ ID NO: 721 - protein, 14 aa, synthetic construct
GSGSVGFIGQNQQT

SEQ ID NO: 722 - protein, 14 aa, synthetic construct
GLHGMTLSGQNQQT

SEQ ID NO: 723 - protein, 14 aa, synthetic construct
GSDQSKRGDSNQQT

SEQ ID NO: 724 - protein, 14 aa, synthetic construct
GSLFLATGGQNQQT

SEQ ID NO: 725 - protein, 14 aa, synthetic construct
GSGQNQQPSAFSKT

SEQ ID NO: 726 - protein, 14 aa, synthetic construct
GSGQLPQSGLNQQT

SEQ ID NO: 727 - protein, 14 aa, synthetic construct
GSGSKQNALQNQQT

SEQ ID NO: 728 - protein, 14 aa, synthetic construct
GSGQRRELSQNQQT

SEQ ID NO: 729 - protein, 14 aa, synthetic construct
GSGQREPKASNQQT

SEQ ID NO: 730 - protein, 14 aa, synthetic construct
GSGQNQQHPSTQQT

SEQ ID NO: 731 - protein, 14 aa, synthetic construct
GSQSTLGLGQNQQT

SEQ ID NO: 732 - protein, 14 aa, synthetic construct
GSGQNQQMPGLSST

SEQ ID NO: 733 - protein, 14 aa, synthetic construct
GSGQNQQTVGGKNL

SEQ ID NO: 734 - protein, 14 aa, synthetic construct
GSSREFHSGQNQQT

SEQ ID NO: 735 - protein, 14 aa, synthetic construct
GSGQNQQTVPSNLV

SEQ ID NO: 736 - protein, 14 aa, synthetic construct
GSGQNAYSSQAQQT

SEQ ID NO: 737 - protein, 14 aa, synthetic construct
GSGQNKDHSTRRQT

SEQ ID NO: 738 - protein, 14 aa, synthetic construct
GQLGSVGSGQDQQT

SEQ ID NO: 739 - protein, 14 aa, synthetic construct
GSGQHAAPGHNQQT

SEQ ID NO: 740 - protein, 14 aa, synthetic construct
GSGQNQQTSQSPPT

SEQ ID NO: 741 - protein, 14 aa, synthetic construct
GSGNYRDHEQNQQT

SEQ ID NO: 742 - protein, 14 aa, synthetic construct
GSGQHSNQHVNQQT

SEQ ID NO: 743 - protein, 14 aa, synthetic construct
GSGQTARNGINQQT

SEQ ID NO: 744 - protein, 14 aa, synthetic construct
GSGQNQQHYGSQGT

SEQ ID NO: 745 - protein, 14 aa, synthetic construct
GSGSPQASRQNQQT

SEQ ID NO: 746 - protein, 14 aa, synthetic construct
GSGFSHSMGKNQQT

SEQ ID NO: 747 - protein, 14 aa, synthetic construct
GSGQSHSLETNQQT

SEQ ID NO: 748 - protein, 14 aa, synthetic construct
GTEQTRQSGQNQQT

SEQ ID NO: 749 - protein, 14 aa, synthetic construct
GSGRHLASVQNQQT

SEQ ID NO: 750 - protein, 14 aa, synthetic construct
GLGSKNHSGQNQQT

SEQ ID NO: 751 - protein, 14 aa, synthetic construct
GSGQNQQTSHFPSA

SEQ ID NO: 752 - protein, 14 aa, synthetic construct
GSGQLSGTPQNQQT

SEQ ID NO: 753 - protein, 14 aa, synthetic construct
GSGQNQQAPHKKET

SEQ ID NO: 754 - protein, 14 aa, synthetic construct
GSGQNQQTLRGSLE

SEQ ID NO: 755 - protein, 14 aa, synthetic construct
GSIAMTSHGQNQQT

SEQ ID NO: 756 - protein, 14 aa, synthetic construct
GSPGVSPSGQNQQT

SEQ ID NO: 757 - protein, 14 aa, synthetic construct
GSGQNQQTGSSSRV

SEQ ID NO: 758 - protein, 14 aa, synthetic construct
GSGQHLPLLGNQQT

SEQ ID NO: 759 - protein, 14 aa, synthetic construct
GSDHSHRGGQNQQT

SEQ ID NO: 760 - protein, 14 aa, synthetic construct
GSGIVTKLGQNQQT

SEQ ID NO: 761 - protein, 14 aa, synthetic construct
GSGQDVTKTGNQQT

SEQ ID NO: 762 - protein, 14 aa, synthetic construct
GSGQNQQSHGRIGT

SEQ ID NO: 763 - protein, 14 aa, synthetic construct
GSGQNQQINHRSPT

SEQ ID NO: 764 - protein, 14 aa, synthetic construct
GSGDDSRVGQNQQT

SEQ ID NO: 765 - protein, 14 aa, synthetic construct
GSGQSTLKRINQQT

SEQ ID NO: 766 - protein, 14 aa, synthetic construct
GSGSQHSKAQNQQT

SEQ ID NO: 767 - protein, 14 aa, synthetic construct
GSGQNQQHASSNNT

SEQ ID NO: 768 - protein, 14 aa, synthetic construct
GSRTYQVSGQNQQT

SEQ ID NO: 769 - protein, 14 aa, synthetic construct
GSGQNQGLLSSPQT

SEQ ID NO: 770 - protein, 14 aa, synthetic construct
GSGGGLQHNQNQQT

SEQ ID NO: 771 - protein, 14 aa, synthetic construct
GSGQNQQTTAATRM

SEQ ID NO: 772 - protein, 14 aa, synthetic construct
GSGQNQRASILVQT

SEQ ID NO: 773 - protein, 14 aa, synthetic construct
GSGQNLGLLGAQQT

SEQ ID NO: 774 - protein, 14 aa, synthetic construct
GSLDLGRSGQNQQT

SEQ ID NO: 775 - protein, 14 aa, synthetic construct
GNSQVKVSGQNQQT

SEQ ID NO: 776 - protein, 14 aa, synthetic construct
GSSGSHQYGQNQQT

SEQ ID NO: 777 - protein, 14 aa, synthetic construct
GSGQNQQQRDGTLT

SEQ ID NO: 778 - protein, 14 aa, synthetic construct
GRGQHVSVANNQQT

SEQ ID NO: 779 - protein, 14 aa, synthetic construct
GDSSSRISGQNQQT

SEQ ID NO: 780 - protein, 14 aa, synthetic construct
GSGQNQQHSLSSQT

SEQ ID NO: 781 - protein, 14 aa, synthetic construct
GSLMDVHRGQNQQT

SEQ ID NO: 782 - protein, 14 aa, synthetic construct
GSIQYQSSGQNQQT

SEQ ID NO: 783 - protein, 14 aa, synthetic construct
GLGSKNPSGQNQQT

SEQ ID NO: 784 - protein, 14 aa, synthetic construct
GSGQLVLTLQNQQT

SEQ ID NO: 785 - protein, 14 aa, synthetic construct
GSGQNQQTSQPLPG

SEQ ID NO: 786 - protein, 14 aa, synthetic construct
GSGQNQQNLGKLNT

SEQ ID NO: 787 - protein, 14 aa, synthetic construct
GTTAHQPSGQNQQT

SEQ ID NO: 788 - protein, 14 aa, synthetic construct
GSGQNRAQIGTQQT

SEQ ID NO: 789 - protein, 14 aa, synthetic construct
GSGQYVHVSSNQQT

SEQ ID NO: 790 - protein, 14 aa, synthetic construct
GSGQNQQTAHAFNI

SEQ ID NO: 791 - protein, 14 aa, synthetic construct
GSGQNQRTMVATQT

SEQ ID NO: 792 - protein, 14 aa, synthetic construct
GSGQNPIRGAMQQT

SEQ ID NO: 793 - protein, 14 aa, synthetic construct
GSGYVITGSQNQQT

SEQ ID NO: 794 - protein, 14 aa, synthetic construct
GRGPKQSNIQNQQT

SEQ ID NO: 795 - protein, 14 aa, synthetic construct
GSGQNQQTMLGKPC

SEQ ID NO: 796 - protein, 14 aa, synthetic construct
GSGQNQQVGSTVRT

SEQ ID NO: 797 - protein, 14 aa, synthetic construct
GNVTTQKSGQNQQT

SEQ ID NO: 798 - protein, 14 aa, synthetic construct
GSGNPVSHLQNQQT

SEQ ID NO: 799 - protein, 14 aa, synthetic construct
GSLSHMESGQNQQT

SEQ ID NO: 800 - protein, 14 aa, synthetic construct
GRAPTNLSGQNQQT

SEQ ID NO: 801 - protein, 14 aa, synthetic construct
GSGQNQQTVMTARA

SEQ ID NO: 802 - protein, 14 aa, synthetic construct
GSGMPASRLQNQQT

SEQ ID NO: 803 - protein, 14 aa, synthetic construct
GVVRNHQSGQNQQT

SEQ ID NO: 804 - protein, 14 aa, synthetic construct
GSGQNQHSVQVRQT

SEQ ID NO: 805 - protein, 14 aa, synthetic construct
GSGQNTGHLTMQQT

SEQ ID NO: 806 - protein, 14 aa, synthetic construct
GSGQNQQYAGKILT

SEQ ID NO: 807 - protein, 14 aa, synthetic construct
GSGNPHVRNQNQQT

SEQ ID NO: 808 - protein, 14 aa, synthetic construct
GSGQNGGSSNRQQT

SEQ ID NO: 809 - protein, 14 aa, synthetic construct
GSGQRLSQGVNHQT

SEQ ID NO: 810 - protein, 14 aa, synthetic construct
GSGQNAHAKEGQQT

SEQ ID NO: 811 - protein, 14 aa, synthetic construct
GSSPAPNSGQNQQT

SEQ ID NO: 812 - protein, 14 aa, synthetic construct
GLAHKTSSGQNQQT

SEQ ID NO: 813 - protein, 14 aa, synthetic construct
GSGQNQQTPGAHKT

SEQ ID NO: 814 - protein, 14 aa, synthetic construct
GSGQNQQSLSGSFT

SEQ ID NO: 815 - protein, 14 aa, synthetic construct
GSGQNQQSTGTSRT

SEQ ID NO: 816 - protein, 14 aa, synthetic construct
GSGQNQQTVQSNLV

SEQ ID NO: 817 - protein, 14 aa, synthetic construct
GSGQNQQLGSRQCT

SEQ ID NO: 818 - protein, 14 aa, synthetic construct
GSGQNQYLRLELQT

SEQ ID NO: 819 - protein, 14 aa, synthetic construct
GSGQNQQTSPRLQT

SEQ ID NO: 820 - protein, 14 aa, synthetic construct
GSGQNQQTTSSNMT

SEQ ID NO: 821 - protein, 14 aa, synthetic construct
GTASTYNSGQNQQT

SEQ ID NO: 822 - protein, 14 aa, synthetic construct
GSGQNQQTMPQHKI

SEQ ID NO: 823 - protein, 14 aa, synthetic construct
GSGQSHLHTGNQQT

SEQ ID NO: 824 - protein, 14 aa, synthetic construct
GVKGVGHSGQNQQT

SEQ ID NO: 825 - protein, 14 aa, synthetic construct
GSGKVTKQSQNQQT

SEQ ID NO: 826 - protein, 14 aa, synthetic construct
GSGQNQQTALEKSL

SEQ ID NO: 827 - protein, 14 aa, synthetic construct
GSGYKDTYGQNQQT

SEQ ID NO: 828 - protein, 14 aa, synthetic construct
GSGQNQQSGTFLST

SEQ ID NO: 829 - protein, 14 aa, synthetic construct
GSGQNTGQHMMQQT

SEQ ID NO: 830 - protein, 14 aa, synthetic construct
GSGKNQQRPGLDQT

SEQ ID NO: 831 - protein, 14 aa, synthetic construct
GSGQSREISLNQQT

SEQ ID NO: 832 - protein, 14 aa, synthetic construct
GTPTSPSSGQNQQT

SEQ ID NO: 833 - protein, 14 aa, synthetic construct
GKPAGGLSGQNQQT

SEQ ID NO: 834 - protein, 14 aa, synthetic construct
GSGQNHRSADMQQT

SEQ ID NO: 835 - protein, 14 aa, synthetic construct
GSGQNQQTLPSLSL

SEQ ID NO: 836 - protein, 14 aa, synthetic construct
GSPYMGATGQNQQT

SEQ ID NO: 837 - protein, 14 aa, synthetic construct
GSGHAKAVGQNQQT

SEQ ID NO: 838 - protein, 14 aa, synthetic construct
GHMKGVTSGQNQQT

SEQ ID NO: 839 - protein, 14 aa, synthetic construct
GSGQNQKILTLDQT

SEQ ID NO: 840 - protein, 14 aa, synthetic construct
GSGQNQQTKVGHSA

SEQ ID NO: 841 - protein, 14 aa, synthetic construct
GIARTTISGQNQQT

SEQ ID NO: 842 - protein, 14 aa, synthetic construct
GSGQNQQTSVGFRT

SEQ ID NO: 843 - protein, 14 aa, synthetic construct
GSGQNQQTMIANIR

SEQ ID NO: 844 - protein, 14 aa, synthetic construct
GDMTRSSSGQNQQT

SEQ ID NO: 845 - protein, 14 aa, synthetic construct
GSGHMSDLRQNQQT

SEQ ID NO: 846 - protein, 14 aa, synthetic construct
GRGAVMASGQNQQT

SEQ ID NO: 847 - protein, 14 aa, synthetic construct
GSGQNQQLSGKSVT

SEQ ID NO: 848 - protein, 14 aa, synthetic construct
GSHTLVVSGQNQQT

SEQ ID NO: 849 - protein, 14 aa, synthetic construct
GSGPWSAGLQNQQT

SEQ ID NO: 850 - protein, 14 aa, synthetic construct
GSGQHSPHALNQQT

SEQ ID NO: 851 - protein, 14 aa, synthetic construct
GSGQNQQPNSGSMT

SEQ ID NO: 852 - protein, 14 aa, synthetic construct
GSGLAHLGGQNQQT

SEQ ID NO: 853 - protein, 14 aa, synthetic construct
GSSVRYEPKQNQQT

SEQ ID NO: 854 - protein, 14 aa, synthetic construct
GSGQNQQARPLELT

SEQ ID NO: 855 - protein, 14 aa, synthetic construct
GSGQPRSTGINQQT

SEQ ID NO: 856 - protein, 14 aa, synthetic construct
GSGQNQANWVKVQT

SEQ ID NO: 857 - protein, 14 aa, synthetic construct
GSGHLFQSGQNQQT

SEQ ID NO: 858 - protein, 14 aa, synthetic construct
GSGQNRGISISQQT

SEQ ID NO: 859 - protein, 14 aa, synthetic construct
GSGTHYDNRQNQQT

SEQ ID NO: 860 - protein, 14 aa, synthetic construct
GSGQNQQTSTTPLP

SEQ ID NO: 861 - protein, 14 aa, synthetic construct
GSGQVHASQVNQKT

SEQ ID NO: 862 - protein, 14 aa, synthetic construct
GSSGHRESGQNQQT

SEQ ID NO: 863 - protein, 14 aa, synthetic construct
GLSAEKSSGQNQQT

SEQ ID NO: 864 - protein, 14 aa, synthetic construct
GSGQEHRSLANQQT

SEQ ID NO: 865 - protein, 14 aa, synthetic construct
GSGQTVVRIANQQT

SEQ ID NO: 866 - protein, 14 aa, synthetic construct
GSGQNVSSVHRQQT

SEQ ID NO: 867 - protein, 14 aa, synthetic construct
GSGASRMSIQNQQT

SEQ ID NO: 868 - protein, 14 aa, synthetic construct
GVAFIGSSGQNQQT

SEQ ID NO: 869 - protein, 14 aa, synthetic construct
GSGQNQQTVPTRQT

SEQ ID NO: 870 - protein, 14 aa, synthetic construct
GSGQAAKSSQNQQT

SEQ ID NO: 871 - protein, 14 aa, synthetic construct
GSGQNQQVAIRTST

SEQ ID NO: 872 - protein, 14 aa, synthetic construct
GSVHMQNAGQNQQT

SEQ ID NO: 873 - protein, 14 aa, synthetic construct
GSGMRQAGVQNQQT

SEQ ID NO: 874 - protein, 14 aa, synthetic construct
GSGQNQQVGGKTVT

SEQ ID NO: 875 - protein, 14 aa, synthetic construct
GVHDMRVSGQNQQT

SEQ ID NO: 876 - protein, 14 aa, synthetic construct
GSGQHVSVANNQQT

SEQ ID NO: 877 - protein, 14 aa, synthetic construct
GSAAMSVRGQNQQT

SEQ ID NO: 878 - protein, 14 aa, synthetic construct
GVSRGGPSGQNQQT

SEQ ID NO: 879 - protein, 14 aa, synthetic construct
GSGQMVHTIGNQQT

SEQ ID NO: 880 - protein, 14 aa, synthetic construct
GRGGSMAETQNQQT

SEQ ID NO: 881 - protein, 14 aa, synthetic construct
GSGHTNPTRQNQQT

SEQ ID NO: 882 - protein, 14 aa, synthetic construct
GSGEAARYEQNQQT

SEQ ID NO: 883 - protein, 14 aa, synthetic construct
GSGQNERHLVLQQT

SEQ ID NO: 884 - protein, 14 aa, synthetic construct
GSGQNQQSKQQVLT

SEQ ID NO: 885 - protein, 14 aa, synthetic construct
GSGQARAHRGNQQT

SEQ ID NO: 886 - protein, 14 aa, synthetic construct
GSGQNQQPLDTSRT

SEQ ID NO: 887 - protein, 14 aa, synthetic construct
GSGQNQQLANMVTT

SEQ ID NO: 888 - protein, 14 aa, synthetic construct
GSGQMKDLHRNQQT

SEQ ID NO: 889 - protein, 14 aa, synthetic construct
GSGQNQHLSSFVQT

SEQ ID NO: 890 - protein, 14 aa, synthetic construct
GSGQNQQPSSRVTT

SEQ ID NO: 891 - protein, 14 aa, synthetic construct
GSGQNQQLAITLGT

SEQ ID NO: 892 - protein, 14 aa, synthetic construct
GSGQNQQTVGNPAT

SEQ ID NO: 893 - protein, 14 aa, synthetic construct
GSGQNQGRAHPMQT

SEQ ID NO: 894 - protein, 14 aa, synthetic construct
GSGQLIASVVNQQT

SEQ ID NO: 895 - protein, 14 aa, synthetic construct
GSSVRSLVGQNQQT

SEQ ID NO: 896 - protein, 14 aa, synthetic construct
GGAGSAHSGQNQQT

SEQ ID NO: 897 - protein, 14 aa, synthetic construct
GSDQNQQTMSSTRT

SEQ ID NO: 898 - protein, 14 aa, synthetic construct
GSGQNQQMAGAFRT

SEQ ID NO: 899 - protein, 14 aa, synthetic construct
GSLGNLQRGQNQQT

SEQ ID NO: 900 - protein, 14 aa, synthetic construct
GSGPSISHGQNQQT

SEQ ID NO: 901 - protein, 14 aa, synthetic construct
GSGQNQQSSFNVQT

SEQ ID NO: 902 - protein, 14 aa, synthetic construct
GSGQNQQTGQATHN

SEQ ID NO: 903 - protein, 14 aa, synthetic construct
VSGSPHSKAQNQQT

SEQ ID NO: 904 - protein, 14 aa, synthetic construct
CSGSPHSKAQNQQT

SEQ ID NO: 905 - protein, 14 aa, synthetic construct
GSGSPHRKAQNQQT

SEQ ID NO: 906 - protein, 14 aa, synthetic construct
GRGSPHSKAQNQQT

SEQ ID NO: 907 - protein, 14 aa, synthetic construct
GSGSPHSKAQNKQT

SEQ ID NO: 908 - protein, 14 aa, synthetic construct
GSGSPHSKAQTQQT

SEQ ID NO: 909 - protein, 14 aa, synthetic construct
GSGSTHASRQNQQT

SEQ ID NO: 910 - protein, 14 aa, synthetic construct
GSGSPHKYGQNQQT

SEQ ID NO: 911 - protein, 14 aa, synthetic construct
GSGSPHKFGQNQQT

SEQ ID NO: 912 - protein, 14 aa, synthetic construct
VSGSPHKFGQNQQT

SEQ ID NO: 913 - protein, 14 aa, synthetic construct
GSGSPHSKAQNHQT

SEQ ID NO: 914 - protein, 14 aa, synthetic construct
GSGSPHSKAQHQQT

SEQ ID NO: 915 - protein, 14 aa, synthetic construct
GSGSPHKTYQNQQT

SEQ ID NO: 916 - protein, 14 aa, synthetic construct
VSGSPHASRQNQQT

SEQ ID NO: 917 - protein, 14 aa, synthetic construct
GSGSPHKFGKNQQT

SEQ ID NO: 918 - protein, 14 aa, synthetic construct
GSGSPHASRQNQHT

SEQ ID NO: 919 - protein, 14 aa, synthetic construct
GSHSPHKSGQNQQT

SEQ ID NO: 920 - protein, 14 aa, synthetic construct
GSGQNQQRRMSPST

SEQ ID NO: 921 - protein, 14 aa, synthetic construct
GSGSPHSKPQNQQT

SEQ ID NO: 922 - protein, 14 aa, synthetic construct
GSGSPHKFGQKQQT

SEQ ID NO: 923 - protein, 14 aa, synthetic construct
VSGSPHGARQNQQT

SEQ ID NO: 924 - protein, 14 aa, synthetic construct
GSGSPHSKAQKQQT

SEQ ID NO: 925 - protein, 14 aa, synthetic construct
GSHSPHKRGQNQQT

SEQ ID NO: 926 - protein, 14 aa, synthetic construct
GSGQNRQRLKGLET

SEQ ID NO: 927 - protein, 14 aa, synthetic construct
GSGSPHKLGQNQQT

SEQ ID NO: 928 - protein, 14 aa, synthetic construct
GSGSPHKTSKNQQT

SEQ ID NO: 929 - protein, 14 aa, synthetic construct
GSGSPHKIGQNQQT

SEQ ID NO: 930 - protein, 14 aa, synthetic construct
GSGQDSPHVRNQQT

SEQ ID NO: 931 - protein, 14 aa, synthetic construct
GSGSPHKTSQNQQT

SEQ ID NO: 932 - protein, 14 aa, synthetic construct
GSGSPHASRKNQQT

SEQ ID NO: 933 - protein, 14 aa, synthetic construct
GSHSPHKSGQKQQT

SEQ ID NO: 934 - protein, 14 aa, synthetic construct
GSGSPHKTSQKQQT

SEQ ID NO: 935 - protein, 14 aa, synthetic construct
GSGSPHVRGQNKQT

SEQ ID NO: 936 - protein, 14 aa, synthetic construct
GSGSPHKTTQNQQT

SEQ ID NO: 937 - protein, 14 aa, synthetic construct
GSGPVRALRQNQQT

SEQ ID NO: 938 - protein, 14 aa, synthetic construct
GSGSPHVRGQKQQT

SEQ ID NO: 939 - protein, 14 aa, synthetic construct
CSGSPHKTSQNQQT

SEQ ID NO: 940 - protein, 14 aa, synthetic construct
CSHSPHKSGQNQQT

SEQ ID NO: 941 - protein, 6 aa, synthetic construct
SPHSKA

SEQ ID NO: 942 - DNA, 18 bp, synthetic construct
  source 1..18: mol_type = other DNA
agcccacacagcaaagca

SEQ ID NO: 943 - protein, 8 aa, synthetic construct
HDSPHKSG

SEQ ID NO: 944 - DNA, 24 bp, synthetic construct
  source 1..24: mol_type = other DNA
cacgacagcccacacaaaagcgga

SEQ ID NO: 945 - protein, 6 aa, synthetic construct
SPHSKA

SEQ ID NO: 946 - protein, 6 aa, synthetic construct
SPHKSG

SEQ ID NO: 947 - protein, 6 aa, synthetic construct
SPHARM

SEQ ID NO: 948 - protein, 6 aa, synthetic construct
SPHVKS

SEQ ID NO: 949 - protein, 6 aa, synthetic construct
SPHASR

SEQ ID NO: 950 - protein, 6 aa, synthetic construct
SPHVKI

SEQ ID NO: 951 - protein, 6 aa, synthetic construct
SPHKSR

SEQ ID NO: 952 - protein, 6 aa, synthetic construct
SPHSLR

SEQ ID NO: 953 - protein, 6 aa, synthetic construct
SPHSKW

SEQ ID NO: 954 - protein, 6 aa, synthetic construct
SPHKKN

SEQ ID NO: 955 - protein, 6 aa, synthetic construct
SPHVRM

SEQ ID NO: 956 - protein, 6 aa, synthetic construct
SPHRKA

SEQ ID NO: 957 - protein, 6 aa, synthetic construct
SPHKFG

SEQ ID NO: 958 - protein, 6 aa, synthetic construct
SPHKIG

SEQ ID NO: 959 - protein, 6 aa, synthetic construct
SPHKLG

SEQ ID NO: 960 - protein, 6 aa, synthetic construct
SPHSKL

SEQ ID NO: 961 - protein, 6 aa, synthetic construct
SPHSRG

SEQ ID NO: 962 - protein, 6 aa, synthetic construct
SPHSKS

SEQ ID NO: 963 - protein, 6 aa, synthetic construct
SPHKTS

SEQ ID NO: 964 - protein, 6 aa, synthetic construct
SPHKTT

SEQ ID NO: 965 - protein, 6 aa, synthetic construct
SPHKTY

SEQ ID NO: 966 - protein, 6 aa, synthetic construct
SPHKYG

SEQ ID NO: 967 - protein, 6 aa, synthetic construct
SPHSKD

SEQ ID NO: 968 - protein, 6 aa, synthetic construct
SPHSKP

SEQ ID NO: 969 - protein, 6 aa, synthetic construct
SPHSRA

SEQ ID NO: 970 - protein, 6 aa, synthetic construct
SPHSSR

SEQ ID NO: 971 - protein, 6 aa, synthetic construct
SPHWKA

SEQ ID NO: 972 - protein, 6 aa, synthetic construct
SPHTRG

SEQ ID NO: 973 - protein, 6 aa, synthetic construct
SPHVRG

SEQ ID NO: 974 - protein, 6 aa, synthetic construct
SPHKRG

SEQ ID NO: 975 - protein, 6 aa, synthetic construct
SPHGAR

SEQ ID NO: 976 - protein, 6 aa, synthetic construct
SPHRSG

SEQ ID NO: 977 - protein, 6 aa, synthetic construct
SPHKSA

SEQ ID NO: 978 - protein, 6 aa, synthetic construct
SPHSKR

SEQ ID NO: 979 - protein, 6 aa, synthetic construct
SPHFLR

SEQ ID NO: 980 - protein, 6 aa, synthetic construct
SPHVRR

SEQ ID NO: 981 - protein, 742 aa, synthetic construct
MAADGYLPDWLEDNLSEGIREWWALKPGAPQPKANQQHQDNARGLVLPGYKYLGPGNGLDKGEPVNAADAAALEHDKAYDQQLKAGDNPYLKYNHADAEFQERLKEDTSFGGNLGRAVFQAKKRLLEPLGLVEEAAKTAPGKKRPVEQSPQEPDSSAGIGKSGAQPAKKRLNFGQTGDTESVPDPQPIGEPPAAPSGVGSLTMASGGGAPVADNNEGADGVGSSSGNWHCDSQWLGDRVITTSTRTWALPTYNNHLYKQISNSTSGGSSNDNAYFGYSTPWGYFDFNRFHCHFSPRDWQRLINNNWGFRPKRLNFKLFNIQVKEVTDNNGVKTIANNLTSTVQVFTDSDYQLPYVLGSAHEGCLPPFPADVFMIPQYGYLTLNDGSQAVGRSSFYCLEYFPSQMLRTGNNFQFSYEFENVPFHSSYAHSQSLDRLMNPLIDQYLYYLSKTINGSGSPHSKAQNQQTLKFSVAGPSNMAVQGRNYIPGPSYRQQRVSTTVTQNNNSEFAWPGASSWALNGRNSLMNPGPAMASHKEGEDRFFPLSGSLIFGKQGTGRDNVDADKVMITNEEEIKTTNPVATESYGQVATNHQSAQAQAQTGWVQNQGILPGMVWQDRDVYLQGPIWAKIPHTDGNFHPSPLMGGFGMKHPPPQILIKNTPVPADPPTAFNKDKLNSFITQYSTGQVSVEIEWELQKENSKRWNPEIQYTSNYYKSNNVEFAVNTEGVYSEPRPIGTRYLTRNL

SEQ ID NO: 982 - protein, 742 aa, synthetic construct
MAADGYLPDWLEDNLSEGIREWWALKPGAPQPKANQQHQDNARGLVLPGYKYLGPGNGLDKGEPVNAADAAALEHDKAYDQQLKAGDNPYLKYNHADAEFQERLKEDTSFGGNLGRAVFQAKKRLLEPLGLVEEAAKTAPGKKRPVEQSPQEPDSSAGIGKSGAQPAKKRLNFGQTGDTESVPDPQPIGEPPAAPSGVGSLTMASGGGAPVADNNEGADGVGSSSGNWHCDSQWLGDRVITTSTRTWALPTYNNHLYKQISNSTSGGSSNDNAYFGYSTPWGYFDFNRFHCHFSPRDWQRLINNNWGFRPKRLNFKLFNIQVKEVTDNNGVKTIANNLTSTVQVFTDSDYQLPYVLGSAHEGCLPPFPADVFMIPQYGYLTLNDGSQAVGRSSFYCLEYFPSQMLRTGNNFQFSYEFENVPFHSSYAHSQSLDRLMNPLIDQYLYYLSKTINGHDSPHKSGQNQQTLKFSVAGPSNMAVQGRNYIPGPSYRQQRVSTTVTQNNNSEFAWPGASSWALNGRNSLMNPGPAMASHKEGEDRFFPLSGSLIFGKQGTGRDNVDADKVMITNEEEIKTTNPVATESYGQVATNHQSAQAQAQTGWVQNQGILPGMVWQDRDVYLQGPIWAKIPHTDGNFHPSPLMGGFGMKHPPPQILIKNTPVPADPPTAFNKDKLNSFITQYSTGQVSVEIEWELQKENSKRWNPEIQYTSNYYKSNNVEFAVNTEGVYSEPRPIGTRYLTRNL

SEQ ID NO: 983 - DNA, 2229 bp, synthetic construct
  source 1..2229: mol_type = other DNA
atggctgccgatggttatcttccagattggctcgaggacaaccttagtgaaggaattcgcgagtggtgggctttgaaacctggagcccctcaacccaaggcaaatcaacaacatcaagacaacgctcgaggtcttgtgcttccgggttacaaataccttggacccggcaacggactcgacaagggggagccggtcaacgcagcagacgcggcggccctcgagcacgacaaggcctacgaccagcagctcaaggccggagacaacccgtacctcaagtacaaccacgccgacgccgagttccaggagcggctcaaagaagatacgtcttttgggggcaacctcgggcgagcagtcttccaggccaaaaagaggcttcttgaacctcttggtctggttgaggaagcggctaagacggctcctggaaagaagaggcctgtagagcagtctcctcaggaaccggactcctccgcgggtattggcaaatcgggtgcacagcccgctaaaaagagactcaatttcggtcagactggcgacacagagtcagtcccagaccctcaaccaatcggagaacctcccgcagccccctcaggtgtgggatctcttacaatggcttcaggtggtggcgcaccagtggcagacaataacgaaggtgccgatggagtgggtagttcctcgggaaattggcattgcgattcccaatggctgggggacagagtcatcaccaccagcacccgaacctgggccctgcccacctacaacaatcacctctacaagcaaatctccaacagcacatctggaggatcttcaaatgacaacgcctacttcggctacagcaccccctgggggtattttgacttcaacagattccactgccacttctcaccacgtgactggcagcgactcatcaacaacaactggggattccggcctaagcgactcaacttcaagctcttcaacattcaggtcaaagaggttacggacaacaatggagtcaagaccatcgccaataaccttaccagcacggtccaggtcttcacggactcagactatcagctcccgtacgtgctcgggtcggctcacgagggctgcctcccgccgttcccagcggacgttttcatgattcctcagtacgggtatctgacgcttaatgatggaagccaggccgtgggtcgttcgtccttttactgcctggaatatttcccgtcgcaaatgctaagaacgggtaacaacttccagttcagctacgagtttgagaacgtacctttccatagcagctacgctcacagccaaagcctggaccgactaatgaatccactcatcgaccaatacttgtattacttgagtaaaacaattaacggaagcggaagcccacacagcaaagcacaaaaccaacagaccttgaagttttcggtagctggtcctagcaacatggctgtccagggaagaaactacatacctggacccagctaccgacaacaacgtgtctcaaccactgtgactcaaaacaacaacagcgaatttgcttggcctggagcttcttcttgggctctcaatggacgtaatagcttgatgaatcctggacctgctatggccagccacaaagaaggagaggaccgtttctttcctttgtctggatctttaatttttggcaaacaaggaactggaagagacaacgtggatgcggacaaagtcatgataaccaacgaagaagaaattaaaactactaacccggtagcaacggagtcctatggacaagtggccacaaaccaccagagtgcccaagcacaggcgcagaccggctgggttcaaaaccaaggaatacttccgggtatggtttggcaggacagagatgtgtacctgcaaggacccatttgggccaaaattcctcacacggacggcaactttcacccttctccgctgatgggagggtttggaatgaagcacccgcctcctcagatcctcatcaaaaacacacctgtacctgcggatcctccaacggccttcaacaaggacaagctgaactctttcatcacccagtattctactggccaagtcagcgtggagatcgagtgggagctgcagaaggaaaacagcaagcgctggaacccggagatccagtacacttccaactattacaagtctaataatgttgaatttgctgttaatactgaaggtgtatatagtgaaccccgccccattggcacgcggtatttaacgaggaacttataa

SEQ ID NO: 984 - DNA, 2229 bp, synthetic construct
  source 1..2229: mol_type = other DNA
atggctgccgatggttatcttccagattggctcgaggacaaccttagtgaaggaattcgcgagtggtgggctttgaaacctggagcccctcaacccaaggcaaatcaacaacatcaagacaacgctcgaggtcttgtgcttccgggttacaaataccttggacccggcaacggactcgacaagggggagccggtcaacgcagcagacgcggcggccctcgagcacgacaaggcctacgaccagcagctcaaggccggagacaacccgtacctcaagtacaaccacgccgacgccgagttccaggagcggctcaaagaagatacgtcttttgggggcaacctcgggcgagcagtcttccaggccaaaaagaggcttcttgaacctcttggtctggttgaggaagcggctaagacggctcctggaaagaagaggcctgtagagcagtctcctcaggaaccggactcctccgcgggtattggcaaatcgggtgcacagcccgctaaaaagagactcaatttcggtcagactggcgacacagagtcagtcccagaccctcaaccaatcggagaacctcccgcagccccctcaggtgtgggatctcttacaatggcttcaggtggtggcgcaccagtggcagacaataacgaaggtgccgatggagtgggtagttcctcgggaaattggcattgcgattcccaatggctgggggacagagtcatcaccaccagcacccgaacctgggccctgcccacctacaacaatcacctctacaagcaaatctccaacagcacatctggaggatcttcaaatgacaacgcctacttcggctacagcaccccctgggggtattttgacttcaacagattccactgccacttctcaccacgtgactggcagcgactcatcaacaacaactggggattccggcctaagcgactcaacttcaagctcttcaacattcaggtcaaagaggttacggacaacaatggagtcaagaccatcgccaataaccttaccagcacggtccaggtcttcacggactcagactatcagctcccgtacgtgctcgggtcggctcacgagggctgcctcccgccgttcccagcggacgttttcatgattcctcagtacgggtatctgacgcttaatgatggaagccaggccgtgggtcgttcgtccttttactgcctggaatatttcccgtcgcaaatgctaagaacgggtaacaacttccagttcagctacgagtttgagaacgtacctttccatagcagctacgctcacagccaaagcctggaccgactaatgaatccactcatcgaccaatacttgtattacttgagtaaaacaattaacggacacgacagcccacacaaaagcggacaaaaccaacagaccttgaagttttcggtagctggtcctagcaacatggctgtccagggaagaaactacatacctggacccagctaccgacaacaacgtgtctcaaccactgtgactcaaaacaacaacagcgaatttgcttggcctggagcttcttcttgggctctcaatggacgtaatagcttgatgaatcctggacctgctatggccagccacaaagaaggagaggaccgtttctttcctttgtctggatctttaatttttggcaaacaaggaactggaagagacaacgtggatgcggacaaagtcatgataaccaacgaagaagaaattaaaactactaacccggtagcaacggagtcctatggacaagtggccacaaaccaccagagtgcccaagcacaggcgcagaccggctgggttcaaaaccaaggaatacttccgggtatggtttggcaggacagagatgtgtacctgcaaggacccatttgggccaaaattcctcacacggacggcaactttcacccttctccgctgatgggagggtttggaatgaagcacccgcctcctcagatcctcatcaaaaacacacctgtacctgcggatcctccaacggccttcaacaaggacaagctgaactctttcatcacccagtattctactggccaagtcagcgtggagatcgagtgggagctgcagaaggaaaacagcaagcgctggaacccggagatccagtacacttccaactattacaagtctaataatgttgaatttgctgttaatactgaaggtgtatatagtgaaccccgccccattggcacgcggtatttaacgaggaacttataa

SEQ ID NO: 985 - protein, 6 aa, synthetic construct
STHASR

SEQ ID NO: 986 - protein, 6 aa, synthetic construct
SQHKSG

SEQ ID NO: 987 - DNA, 1184 bp, synthetic construct
  source 1..1184: mol_type = other DNA
cgtgaggctccggtgcccgtcagtgggcagagcgcacatcgcccacagtccccgagaagttggggggaggggtcggcaattgaaccggtgcctagagaaggtggcgcggggtaaactgggaaagtgatgtcgtgtactggctccgcctttttcccgagggtgggggagaaccgtatataagtgcagtagtcgccgtgaacgttctttttcgcaacgggtttgccgccagaacacaggtaagtgccgtgtgtggttcccgcgggcctggcctctttacgggttatggcccttgcgtgccttgaattacttccacctggctgcagtacgtgattcttgatcccgagcttcgggttggaagtgggtgggagagttcgaggccttgcgcttaaggagccccttcgcctcgtgcttgagttgaggcctggcctgggcgctggggccgccgcgtgcgaatctggtggcaccttcgcgcctgtctcgctgctttcgataagtctctagccatttaaaatttttgatgacctgctgcgacgctttttttctggcaagatagtcttgtaaatgcgggccaagatctgcacactggtatttcggtttttggggccgcgggcggcgacggggcccgtgcgtcccagcgcacatgttcggcgaggcggggcctgcgagcgcggccaccgagaatcggacgggggtagtctcaagctggccggcctgctctggtgcctggcctcgcgccgccgtgtatcgccccgccctgggcggcaaggctggcccggtcggcaccagttgcgtgagcggaaagatggccgcttcccggccctgctgcagggagctcaaaatggaggacgcggcgctcgggagagcgggcgggtgagtcacccacacaaaggaaaagggcctttccgtcctcagccgtcgcttcatgtgactccacggagtaccgggcgccgtccaggcacctcgattagttctcgagcttttggagtacgtcgtctttaggttggggggaggggttttatgcgatggagtttccccacactgagtgggtggagactgaagttaggccagcttggcacttgatgtaattctccttggaatttgccctttttgagtttggatcttggttcattctcaagcctcagacagtggttcaaagtttttttcttccatttcaggtgtcgtga

SEQ ID NO: 988 - DNA, 227 bp, synthetic construct
  source 1..227: mol_type = other DNA
gcccgtcagtgggcagagcgcacatcgcccacagtccccgagaagttggggggaggggtcggcaattgaaccggtgcctagagaaggtggcgcggggtaaactgggaaagtgatgtcgtgtactggctccgcctttttcccgagggtgggggagaaccgtatataagtgcagtagtcgccgtgaacgttctttttcgcaacgggtttgccgccagaacacgcgtaag

SEQ ID NO: 989 - skipped

SEQ ID NO: 990 - DNA, 16 bp, synthetic construct
  source 1..16: mol_type = other DNA
ggtggagaagagcatg

SEQ ID NO: 991 - DNA, 27 bp, synthetic construct
  source 1..27: mol_type = other DNA
gtcatcactgaggtggagaagagcatg

SEQ ID NO: 992-994 - skipped (3 entries)

SEQ ID NO: 995 - DNA, 222 bp, synthetic construct
  source 1..222: mol_type = other DNA
gcccgtcagtgggcagagcgcacatcgcccacagtccccgagaagttggggggaggggtcggcaattgaaccggtgcctagagaaggtggcgcggggtaaactgggaaagtgatgtcgtgtactggctccgcctttttcccgagggtgggggagaaccgtatataagtgcagtagtcgccgtgaacgttctttttcgcaacgggtttgccgccagaacacag

SEQ ID NO: 996 - DNA, 222 bp, synthetic construct
  source 1..222: mol_type = other DNA
gcccgtcagtgggcagagcgcacatcgcccacagtccccgagaagttggggggaggggtcggcaattgaaccggtgcctagagaaggtggcgcggggtaaactgggaaagtgatgtcgtgtactggctccgcctttttcccgagggtgggggagaaccgtatataagtgcagtagtcgccgtgaacgttctttttcgcaacgggtttgccgccagaacacgc

SEQ ID NO: 997 - skipped

SEQ ID NO: 998 - DNA, 229 bp, synthetic construct
  source 1..229: mol_type = other DNA
gtgcccgtcagtgggcagagcgcacatcgcccacagtccccgagaagttggggggaggggtcggcaattgaaccggtgcctagagaaggtggcgcggggtaaactgggaaagtgatgtcgtgtactggctccgcctttttcccgagggtgggggagaaccgtatataagtgcagtagtcgccgtgaacgttctttttcgcaacgggtttgccgccagaacacgcgtaag

SEQ ID NO: 999 - DNA, 235 bp, synthetic construct
  source 1..235: mol_type = other DNA
gctccggtgcccgtcagtgggcagagcgcacatcgcccacagtccccgagaagttggggggaggggtcggcaattgaaccggtgcctagagaaggtggcgcggggtaaactgggaaagtgatgtcgtgtactggctccgcctttttcccgagggtgggggagaaccgtatataagtgcagtagtcgccgtgaacgttctttttcgcaacgggtttgccgccagaacacgcgtaag

SEQ ID NO: 1000 - DNA, 241 bp, synthetic construct
  source 1..241: mol_type = other DNA
cgtgaggctccggtgcccgtcagtgggcagagcgcacatcgcccacagtccccgagaagttggggggaggggtcggcaattgaaccggtgcctagagaaggtggcgcggggtaaactgggaaagtgatgtcgtgtactggctccgcctttttcccgagggtgggggagaaccgtatataagtgcagtagtcgccgtgaacgttctttttcgcaacgggtttgccgccagaacacgcgtaag

SEQ ID NO: 1001 - DNA, 236 bp, synthetic construct
  source 1..236: mol_type = other DNA
cgtgaggctccggtgcccgtcagtgggcagagcgcacatcgcccacagtccccgagaagttggggggaggggtcggcaattgaaccggtgcctagagaaggtggcgcggggtaaactgggaaagtgatgtcgtgtactggctccgcctttttcccgagggtgggggagaaccgtatataagtgcagtagtcgccgtgaacgttctttttcgcaacgggtttgccgccagaacacag

SEQ ID NO: 1002 - DNA, 246 bp, synthetic construct
  source 1..246: mol_type = other DNA
gcatgcgtgaggctccggtgcccgtcagtgggcagagcgcacatcgcccacagtccccgagaagttggggggaggggtcggcaattgaaccggtgcctagagaaggtggcgcggggtaaactgggaaagtgatgtcgtgtactggctccgcctttttcccgagggtgggggagaaccgtatataagtgcagtagtcgccgtgaacgttctttttcgcaacgggtttgccgccagaacacgcgtaag

SEQ ID NO: 1003 - DNA, 241 bp, synthetic construct
  source 1..241: mol_type = other DNA
gcatgcgtgaggctccggtgcccgtcagtgggcagagcgcacatcgcccacagtccccgagaagttggggggaggggtcggcaattgaaccggtgcctagagaaggtggcgcggggtaaactgggaaagtgatgtcgtgtactggctccgcctttttcccgagggtgggggagaaccgtatataagtgcagtagtcgccgtgaacgttctttttcgcaacgggtttgccgccagaacacag

SEQ ID NO: 1004 - DNA, 257 bp, synthetic construct
  source 1..257: mol_type = other DNA
ggtggagaagagcatgcgtgaggctccggtgcccgtcagtgggcagagcgcacatcgcccacagtccccgagaagttggggggaggggtcggcaattgaaccggtgcctagagaaggtggcgcggggtaaactgggaaagtgatgtcgtgtactggctccgcctttttcccgagggtgggggagaaccgtatataagtgcagtagtcgccgtgaacgttctttttcgcaacgggtttgccgccagaacacgcgtaag

SEQ ID NO: 1005 - DNA, 252 bp, synthetic construct
  source 1..252: mol_type = other DNA
ggtggagaagagcatgcgtgaggctccggtgcccgtcagtgggcagagcgcacatcgcccacagtccccgagaagttggggggaggggtcggcaattgaaccggtgcctagagaaggtggcgcggggtaaactgggaaagtgatgtcgtgtactggctccgcctttttcccgagggtgggggagaaccgtatataagtgcagtagtcgccgtgaacgttctttttcgcaacgggtttgccgccagaacacag

SEQ ID NO: 1006 - DNA, 268 bp, synthetic construct
  source 1..268: mol_type = other DNA
gtcatcactgaggtggagaagagcatgcgtgaggctccggtgcccgtcagtgggcagagcgcacatcgcccacagtccccgagaagttggggggaggggtcggcaattgaaccggtgcctagagaaggtggcgcggggtaaactgggaaagtgatgtcgtgtactggctccgcctttttcccgagggtgggggagaaccgtatataagtgcagtagtcgccgtgaacgttctttttcgcaacgggtttgccgccagaacacgcgtaag

SEQ ID NO: 1007 - DNA, 263 bp, synthetic construct
  source 1..263: mol_type = other DNA
gtcatcactgaggtggagaagagcatgcgtgaggctccggtgcccgtcagtgggcagagcgcacatcgcccacagtccccgagaagttggggggaggggtcggcaattgaaccggtgcctagagaaggtggcgcggggtaaactgggaaagtgatgtcgtgtactggctccgcctttttcccgagggtgggggagaaccgtatataagtgcagtagtcgccgtgaacgttctttttcgcaacgggtttgccgccagaacacag

SEQ ID NO: 1008 - protein, 18 aa, synthetic construct
KTINGSGSPHSLLWNQQT

SEQ ID NO: 1009 - protein, 18 aa, synthetic construct
KTINGSGSPHSKAQYYVT

SEQ ID NO: 1010 - protein, 18 aa, synthetic construct
KTINGSGSPHSKLRRQQT

SEQ ID NO: 1011 - protein, 18 aa, synthetic construct
KTINGSGSPHSIWQNQQT

SEQ ID NO: 1012 - protein, 18 aa, synthetic construct
KTINGSSSPHCTAQNQQT

SEQ ID NO: 1013 - protein, 18 aa, synthetic construct
KTINGSGSPHSKAGCGQT

SEQ ID NO: 1014 - protein, 18 aa, synthetic construct
KSMNGSGSPHSRAQNQQT

SEQ ID NO: 1015 - protein, 18 aa, synthetic construct
KTINGSGSPHSKRLRQQT

SEQ ID NO: 1016 - protein, 18 aa, synthetic construct
KTINGSGSPHSLRRNQQT

SEQ ID NO: 1017 - protein, 18 aa, synthetic construct
KTINGSGSPHSRGRNQQT

SEQ ID NO: 1018 - protein, 18 aa, synthetic construct
KTINGSGSPHSEIVNQQT

SEQ ID NO: 1019 - protein, 18 aa, synthetic construct
KTINGSGSPHSSRRNQQT

SEQ ID NO: 1020 - protein, 18 aa, synthetic construct
KTINGSGSPHCLLQNQQT

SEQ ID NO: 1021 - protein, 18 aa, synthetic construct
KTIMRVGSPHSKAQNQQT

SEQ ID NO: 1022 - protein, 18 aa, synthetic construct
KTINGSGSPHSKAFRLQT

SEQ ID NO: 1023 - protein, 18 aa, synthetic construct
KTINGSGSPHCLAQNQQT

SEQ ID NO: 1024 - protein, 18 aa, synthetic construct
KTINGSCSPHRKAQNQQT

SEQ ID NO: 1025 - protein, 18 aa, synthetic construct
KTINGSGSPHFLRQNQQT

SEQ ID NO: 1026 - protein, 18 aa, synthetic construct
KTINGSGSPHSLRFNQQT

SEQ ID NO: 1027 - protein, 18 aa, synthetic construct
KTINGSGSPHSYLRNQQT

SEQ ID NO: 1028 - protein, 18 aa, synthetic construct
KTINGSGSPHCSLQNQQT

SEQ ID NO: 1029 - protein, 18 aa, synthetic construct
KTINGSGSPHVLWQNQQT

SEQ ID NO: 1030 - protein, 18 aa, synthetic construct
KTINGSGSPHSKWLLQQT

SEQ ID NO: 1031 - protein, 18 aa, synthetic construct
KTINGSGSPHSLWSNQQT

SEQ ID NO: 1032 - protein, 18 aa, synthetic construct
KTINGSGSPHSKRRLQQT

SEQ ID NO: 1033 - protein, 18 aa, synthetic construct
KTINGSGSPHSVYLNQQT

SEQ ID NO: 1034 - protein, 18 aa, synthetic construct
KTINGSGSPHSLWLNQQT

SEQ ID NO: 1035 - protein, 18 aa, synthetic construct
KTINGSGSPHSKAQRKLT

SEQ ID NO: 1036 - protein, 18 aa, synthetic construct
KTINGSGSPHSKALRRQT

SEQ ID NO: 1037 - protein, 18 aa, synthetic construct
KTINGSGSPHSKAQRLRT

SEQ ID NO: 1038 - protein, 18 aa, synthetic construct
KYLSGSGSPHSKAQNQQT

SEQ ID NO: 1039 - protein, 18 aa, synthetic construct
KTINGSGSPHSKAQRRLT

SEQ ID NO: 1040 - protein, 18 aa, synthetic construct
KTINGSGSPHSKARRQQT

SEQ ID NO: 1041 - protein, 18 aa, synthetic construct
KTINGSGSPHSKARRLQT

SEQ ID NO: 1042 - protein, 18 aa, synthetic construct
KTINGSGSPHSKSRRQQT

SEQ ID NO: 1043 - protein, 18 aa, synthetic construct
KTINGLLSPHWKAQNQQT

SEQ ID NO: 1044 - protein, 18 aa, synthetic construct
KTINGSGSPHSKARLRQT

SEQ ID NO: 1045 - protein, 18 aa, synthetic construct
KTINGSGSPHSKASKRQT

SEQ ID NO: 1046 - protein, 18 aa, synthetic construct
KTINGSGSPHVRRQNQQT

SEQ ID NO: 1047 - protein, 18 aa, synthetic construct
KTINGSGSPHSKAQLYRT

SEQ ID NO: 1048 - protein, 18 aa, synthetic construct
KGLSGSGSPHSKAQNQQT

SEQ ID NO: 1049 - protein, 18 aa, synthetic construct
KTINGSGSPHSLFRNQQT

SEQ ID NO: 1050 - protein, 18 aa, synthetic construct
KTINGSGSPHSKAQLTVT

SEQ ID NO: 1051 - protein, 18 aa, synthetic construct
KTINGSRSPHTRAQNQQT

SEQ ID NO: 1052 - protein, 18 aa, synthetic construct
KTINGSGSPHSKAKLRQT

SEQ ID NO: 1053 - protein, 18 aa, synthetic construct
KTINGSGSPHSKLIRQQT

SEQ ID NO: 1054 - protein, 18 aa, synthetic construct
KTINGSGSPHSKALRFQT

SEQ ID NO: 1055 - protein, 18 aa, synthetic construct
KTINGSGSPHSKRTFQQT

SEQ ID NO: 1056 - protein, 18 aa, synthetic construct
KTINGSGSPHSKAQKRLT

SEQ ID NO: 1057 - protein, 18 aa, synthetic construct
KTINGSGSPHLWSQNQQT

SEQ ID NO: 1058 - protein, 18 aa, synthetic construct
KTINGSGSPHLLWQNQQT

SEQ ID NO: 1059 - protein, 18 aa, synthetic construct
KTINGSGSPHSRLRNQQT

SEQ ID NO: 1060 - protein, 18 aa, synthetic construct
KTINGSGSPHSKRAAQQT

SEQ ID NO: 1061 - protein, 18 aa, synthetic construct
KTINGSGSPHSKRSWQQT

SEQ ID NO: 1062 - protein, 18 aa, synthetic construct
KTINGSGSPHSKAQLRRT

SEQ ID NO: 1063 - protein, 18 aa, synthetic construct
KTINGSGSPHYLVQNQQT

SEQ ID NO: 1064 - protein, 18 aa, synthetic construct
KTINGSGSPHSKLFRQQT

SEQ ID NO: 1065 - protein, 18 aa, synthetic construct
KTINGSGSPHSKRAMQQT

SEQ ID NO: 1066 - protein, 18 aa, synthetic construct
KTINGSGSPHSKTLRQQT

SEQ ID NO: 1067 - protein, 18 aa, synthetic construct
KTINGSGSPHSRSRNQQT

SEQ ID NO: 1068 - protein, 18 aa, synthetic construct
KTINGSGSPHRRRQNQQT

SEQ ID NO: 1069 - protein, 18 aa, synthetic construct
KTINGSGSPHSKTCLQQT

SEQ ID NO: 1070 - protein, 18 aa, synthetic construct
KTINGSGSPHSKSRWQQT

SEQ ID NO: 1071 - protein, 18 aa, synthetic construct
KTINGSGSPHRFRQNQQT

SEQ ID NO: 1072 - protein, 18 aa, synthetic construct
KTINGLRSPHRKAQNQQT

SEQ ID NO: 1073 - protein, 18 aa, synthetic construct
KTRSRSGSPHSKAQNQQT

SEQ ID NO: 1074 - protein, 18 aa, synthetic construct
KTINGSGSPHSKAQLVVT

SEQ ID NO: 1075 - protein, 18 aa, synthetic construct
KTINGSGSPHSRKLNQQT

SEQ ID NO: 1076 - protein, 18 aa, synthetic construct
KTINGSGSPHSLLCNQQT

SEQ ID NO: 1077 - protein, 18 aa, synthetic construct
KTINGKRSPHSKAQNQQT

SEQ ID NO: 1078 - protein, 18 aa, synthetic construct
KTINGSRSPHLFAQNQQT

SEQ ID NO: 1079 - protein, 18 aa, synthetic construct
KSINGSGSPHSKAHDQQT

SEQ ID NO: 1080 - protein, 18 aa, synthetic construct
KTINGSGSPHSKAQRSRT

SEQ ID NO: 1081 - protein, 18 aa, synthetic construct
KTINGSGSPHSTWLNQQT

SEQ ID NO: 1082 - protein, 18 aa, synthetic construct
KTINGSGSPHSKASRRQT

SEQ ID NO: 1083 - protein, 18 aa, synthetic construct
KTINGSGSPHSKRSMQQT

SEQ ID NO: 1084 - protein, 18 aa, synthetic construct
KTINGSGSPHSCLQNQQT

SEQ ID NO: 1085 - protein, 18 aa, synthetic construct
KTINGSGSPHSKRLWQQT

SEQ ID NO: 1086 - protein, 18 aa, synthetic construct
KTINGSGSPHSWLSNQQT

SEQ ID NO: 1087 - protein, 18 aa, synthetic construct
KTINGSGSPHLRRQNQQT

SEQ ID NO: 1088 - protein, 18 aa, synthetic construct
KTINGSGSPHSKARRSQT

SEQ ID NO: 1089 - protein, 18 aa, synthetic construct
KTINGSGSPHSKHLRQQT

SEQ ID NO: 1090 - protein, 18 aa, synthetic construct
KTINGSGSPHSCSQNQQT

SEQ ID NO: 1091 - protein, 18 aa, synthetic construct
KTINGSGSPHSKSFRQQT

SEQ ID NO: 1092 - protein, 18 aa, synthetic construct
KTINGSGSPHLCLQNQQT

SEQ ID NO: 1093 - protein, 18 aa, synthetic construct
KTINGSGSPHSKAQTSRT

SEQ ID NO: 1094 - protein, 18 aa, synthetic construct
KTINGSGSPHSLCSNQQT

SEQ ID NO: 1095 - protein, 18 aa, synthetic construct
KTINGSRSPHLRAQNQQT

SEQ ID NO: 1096 - protein, 18 aa, synthetic construct
KTINGSGSPHSKAQVSKT

SEQ ID NO: 1097 - protein, 18 aa, synthetic construct
KTINGSGSPHSKAQRHVT

SEQ ID NO: 1098 - protein, 18 aa, synthetic construct
KTINGSSSPHLCAQNQQT

SEQ ID NO: 1099 - protein, 18 aa, synthetic construct
KTINGSGSPHSFLRNQQT

SEQ ID NO: 1100 - protein, 18 aa, synthetic construct
KTINGSGSPHSFVLNQQT

SEQ ID NO: 1101 - protein, 18 aa, synthetic construct
KTINGSGSPHSKMRAQQT

SEQ ID NO: 1102 - protein, 18 aa, synthetic construct
KTINGSGSPHRPRQNQQT

SEQ ID NO: 1103 - protein, 18 aa, synthetic construct
KTINGSGSPHSKCLLQQT

SEQ ID NO: 1104 - protein, 18 aa, synthetic construct
KTINGSGSPHSKAQSRRT

SEQ ID NO: 1105 - protein, 18 aa, synthetic construct
KTINGSGSPHSRWQNQQT

SEQ ID NO: 1106 - protein, 18 aa, synthetic construct
KYSVGSGSPHSKAQNQQT

SEQ ID NO: 1107 - protein, 18 aa, synthetic construct
KTINGSGSPHSKRFLQQT

SEQ ID NO: 1108 - protein, 18 aa, synthetic construct
KTINGSGSPHSLFLNQQT

SEQ ID NO: 1109 - protein, 18 aa, synthetic construct
KTINGSGSPHSKAYLRQT

SEQ ID NO: 1110 - protein, 18 aa, synthetic construct
KTINGSGSPHSKRNGQQT

SEQ ID NO: 1111 - protein, 18 aa, synthetic construct
KTINGSGSPHTRRQNQQT

SEQ ID NO: 1112 - protein, 18 aa, synthetic construct
KTINGSGSPHSKPRLQQT

SEQ ID NO: 1113 - protein, 18 aa, synthetic construct
KTINFLRSPHSKAQNQQT

SEQ ID NO: 1114 - protein, 18 aa, synthetic construct
KTINGSGSPHLLCQNQQT

SEQ ID NO: 1115 - protein, 18 aa, synthetic construct
KTINGSGSPHSKARIVQT

SEQ ID NO: 1116 - protein, 18 aa, synthetic construct
KTINGSKSPHFKAQNQQT

SEQ ID NO: 1117 - protein, 18 aa, synthetic construct
KTINGSGSPHSKAQIRLT

SEQ ID NO: 1118 - protein, 18 aa, synthetic construct
KTINGSSSPHWVAQNQQT

SEQ ID NO: 1119 - protein, 18 aa, synthetic construct
KTINGSGSPHSKATRRQT

SEQ ID NO: 1120 - protein, 18 aa, synthetic construct
KTINGSLSPHSCAQNQQT

SEQ ID NO: 1121 - protein, 18 aa, synthetic construct
KTINGSGSPHSLYLNQQT

SEQ ID NO: 1122 - protein, 18 aa, synthetic construct
KTINGSGSPHSKVGRQQT

SEQ ID NO: 1123 - protein, 18 aa, synthetic construct
KTINGSGSPHSRRLNQQT

SEQ ID NO: 1124 - protein, 18 aa, synthetic construct
KTINGSGSPHSKAQHSRT

SEQ ID NO: 1125 - protein, 18 aa, synthetic construct
KTINGSGSPHSKAFPRQT

SEQ ID NO: 1126 - protein, 18 aa, synthetic construct
KTINGSPSPHRRAQNQQT

SEQ ID NO: 1127 - protein, 18 aa, synthetic construct
KTINGSGSPHSKRNLQQT

SEQ ID NO: 1128 - protein, 18 aa, synthetic construct
KTINGSGSPHSKPTRQQT

SEQ ID NO: 1129 - protein, 18 aa, synthetic construct
KTINGSGSPHSKLWLQQT

SEQ ID NO: 1130 - protein, 18 aa, synthetic construct
KTINGSGSPHWLAQNQQT

SEQ ID NO: 1131 - protein, 18 aa, synthetic construct
KTINGSGSPHRTRQNQQT

SEQ ID NO: 1132 - protein, 18 aa, synthetic construct
KTINGSGSPHSKLNKQQT

SEQ ID NO: 1133 - protein, 18 aa, synthetic construct
KTINGSGSPHSSLWNQQT

SEQ ID NO: 1134 - protein, 18 aa, synthetic construct
KTINGSGSPHSKAQITLT

SEQ ID NO: 1135 - protein, 18 aa, synthetic construct
KTINGSGSPHSKFLFQQT

SEQ ID NO: 1136 - protein, 18 aa, synthetic construct
KTINGSGSPHSKRTPQQT

SEQ ID NO: 1137 - protein, 18 aa, synthetic construct
KTINGSGSPHSKAQNSRR

SEQ ID NO: 1138 - protein, 18 aa, synthetic construct
KTINGSGSPHSRLKNQQT

SEQ ID NO: 1139 - protein, 18 aa, synthetic construct
KTINGSGSPHSCLLNQQT

SEQ ID NO: 1140 - protein, 18 aa, synthetic construct
KTINGSGSPHTLYQNQQT

SEQ ID NO: 1141 - protein, 18 aa, synthetic construct
KTINGSGSPHSKYPSQQT

SEQ ID NO: 1142 - protein, 18 aa, synthetic construct
KTINGSGSPHSKLRNQQT

SEQ ID NO: 1143 - protein, 18 aa, synthetic construct
KTINGSGSPHLNWQNQQT

SEQ ID NO: 1144 - protein, 18 aa, synthetic construct
KTINGVVSPHRKAQNQQT

SEQ ID NO: 1145 - protein, 18 aa, synthetic construct
KTINGSGSPHSYRPNQQT

SEQ ID NO: 1146 - protein, 18 aa, synthetic construct
KTINGSTSPHRRAQNQQT

SEQ ID NO: 1147 - protein, 18 aa, synthetic construct
KTINGSCSPHPLAQNQQT

SEQ ID NO: 1148 - protein, 18 aa, synthetic construct
KTINGSGSPHSKAFARQT

SEQ ID NO: 1149 - protein, 18 aa, synthetic construct
KTINGSGSPHSKALRYQT

SEQ ID NO: 1150 - protein, 18 aa, synthetic construct
KTINGSKSPHRLAQNQQT

SEQ ID NO: 1151 - protein, 18 aa, synthetic construct
KTINMRVSPHSKAQNQQT

SEQ ID NO: 1152 - protein, 18 aa, synthetic construct
KTINGSGSPHMYLQNQQT

SEQ ID NO: 1153 - protein, 18 aa, synthetic construct
KTINGSGSPHSKLARQQT

SEQ ID NO: 1154 - protein, 18 aa, synthetic construct
KTINGSGSPHSKARPYQT

SEQ ID NO: 1155 - protein, 18 aa, synthetic construct
KTINGSGSPHSKRVPQQT

SEQ ID NO: 1156 - protein, 18 aa, synthetic construct
KTINGSGSPHLSWQNQQT

SEQ ID NO: 1157 - protein, 18 aa, synthetic construct
KTINGRSSPHGKAQNQQT

SEQ ID NO: 1158 - protein, 18 aa, synthetic construct
KTINGSGSPHLWTQNQQT

SEQ ID NO: 1159 - protein, 18 aa, synthetic construct
KTINGLLSPHRKAQNQQT

SEQ ID NO: 1160 - protein, 18 aa, synthetic construct
KTINGSGSPHRLRQNQQT

SEQ ID NO: 1161 - protein, 18 aa, synthetic construct
KTINGSCSPHSGAQNQQT

SEQ ID NO: 1162 - protein, 18 aa, synthetic construct
KTINGSGSPHSKAQRRST

SEQ ID NO: 1163 - protein, 18 aa, synthetic construct
KTINGSGSPHSKLCSQQT

SEQ ID NO: 1164 - protein, 18 aa, synthetic construct
KTINGSGSPHSKAQLLKT

SEQ ID NO: 1165 - protein, 18 aa, synthetic construct
KTINGRKSPHSKAQNQQT

SEQ ID NO: 1166 - protein, 18 aa, synthetic construct
KTINGSGSPHLLYQNQQT

SEQ ID NO: 1167 - protein, 18 aa, synthetic construct
KTINGSGSPHSKLLRQQT

SEQ ID NO: 1168 - protein, 18 aa, synthetic construct
KTINGSGSPHSLRHNQQT

SEQ ID NO: 1169 - protein, 18 aa, synthetic construct
KTINGSGSPHSSKRNQQT

SEQ ID NO: 1170 - protein, 18 aa, synthetic construct
KTINGSGSPHSKARSRQT

SEQ ID NO: 1171 - protein, 18 aa, synthetic construct
KTINGRSSPHRKAQNQQT

SEQ ID NO: 1172 - protein, 18 aa, synthetic construct
KTINGSKSPHRTAQNQQT

SEQ ID NO: 1173 - protein, 18 aa, synthetic construct
KTINGMRSPHVKAQNQQT

SEQ ID NO: 1174 - protein, 18 aa, synthetic construct
KTINGSGSPHSKRMSQQT

SEQ ID NO: 1175 - protein, 18 aa, synthetic construct
KTINGSGSPHSKVPKQQT

SEQ ID NO: 1176 - protein, 18 aa, synthetic construct
KTINLIRSPHSKAQNQQT

SEQ ID NO: 1177 - protein, 18 aa, synthetic construct
KTINGSGSPHPFLQNQQT

SEQ ID NO: 1178 - protein, 18 aa, synthetic construct
KTINGSGSPHSKARLWQT

SEQ ID NO: 1179 - protein, 18 aa, synthetic construct
KTINGSGSPHSRTRNQQT

SEQ ID NO: 1180 - protein, 18 aa, synthetic construct
KTINGSGSPHSKRSNQQT

SEQ ID NO: 1181 - protein, 18 aa, synthetic construct
KTINGSLSPHSWAQNQQT

SEQ ID NO: 1182 - protein, 18 aa, synthetic construct
KTINGSRSPHYKAQNQQT

SEQ ID NO: 1183 - protein, 18 aa, synthetic construct
KTINRHSSPHSKAQNQQT

SEQ ID NO: 1184 - protein, 18 aa, synthetic construct
KTINGSGSPHSKRRNQQT

SEQ ID NO: 1185 - protein, 18 aa, synthetic construct
KTINGSGSPHSKAKHLQT

SEQ ID NO: 1186 - protein, 18 aa, synthetic construct
KTINGSGSPHSKRTYQQT

SEQ ID NO: 1187 - protein, 18 aa, synthetic construct
KTINGVLSPHRKAQNQQT

SEQ ID NO: 1188 - protein, 18 aa, synthetic construct
KTINGSGSPHSFITNQQT

SEQ ID NO: 1189 - protein, 18 aa, synthetic construct
KTINGSGSPHSTRLNQQT

SEQ ID NO: 1190 - protein, 18 aa, synthetic construct
KTINGSGSPHSKRTSQQT

SEQ ID NO: 1191 - protein, 18 aa, synthetic construct
KTINGSGSPHSRRSNQQT

SEQ ID NO: 1192 - protein, 18 aa, synthetic construct
KTINGHLSPHRKAQNQQT

SEQ ID NO: 1193 - protein, 18 aa, synthetic construct
KTINGSGSPHSKAQFSRT

SEQ ID NO: 1194 - protein, 18 aa, synthetic construct
KTINGSGSPHSKAQTFRT

SEQ ID NO: 1195 - protein, 18 aa, synthetic construct
KTINGSGSPHSKPLRQQT

SEQ ID NO: 1196 - protein, 18 aa, synthetic construct
KTINGSGSPHSKASCRQT

SEQ ID NO: 1197 - protein, 18 aa, synthetic construct
KTINGSGSPHSKILWQQT

SEQ ID NO: 1198 - protein, 18 aa, synthetic construct
KTINGSGSPHSKALKRQT

SEQ ID NO: 1199 - protein, 18 aa, synthetic construct
KTINGSGSPHSKAHRSQT

SEQ ID NO: 1200 - protein, 18 aa, synthetic construct
KTINGSGSPHSMLYNQQT

SEQ ID NO: 1201 - protein, 18 aa, synthetic construct
KTINGSGSPHSKCTLQQT

SEQ ID NO: 1202 - protein, 18 aa, synthetic construct
KTINGSGSPHSKAQNRMR

SEQ ID NO: 1203 - protein, 18 aa, synthetic construct
KTINGSGSPHSKLVRQQT

SEQ ID NO: 1204 - protein, 18 aa, synthetic construct
KTINGSGSPHSKRILQQT

SEQ ID NO: 1205 - protein, 18 aa, synthetic construct
KTINGSGSPHSKAQWLRT

SEQ ID NO: 1206 - protein, 18 aa, synthetic construct
KTINGSGSPHSLTCNQQT

SEQ ID NO: 1207 - protein, 18 aa, synthetic construct
KTINGIRSPHTKAQNQQT

SEQ ID NO: 1208 - protein, 18 aa, synthetic construct
KTINGSGSPHSKAQRWLT

SEQ ID NO: 1209 - protein, 18 aa, synthetic construct
KTINGSGSPHSKAQLSIT

SEQ ID NO: 1210 - protein, 18 aa, synthetic construct
KTINGSGSPHIYRQNQQT

SEQ ID NO: 1211 - protein, 18 aa, synthetic construct
KTINGSGSPHSLRSNQQT

SEQ ID NO: 1212 - protein, 18 aa, synthetic construct
KTINGSGSPHSKVKPQQT

SEQ ID NO: 1213 - protein, 18 aa, synthetic construct
KTINGSGSPHSKATRHQT

SEQ ID NO: 1214 - protein, 18 aa, synthetic construct
KTINGSLSPHLCAQNQQT

SEQ ID NO: 1215 - protein, 18 aa, synthetic construct
KTINGSGSPHSKACASQT

SEQ ID NO: 1216 - protein, 18 aa, synthetic construct
KWSPGSGSPHSKAQNQQT

SEQ ID NO: 1217 - protein, 18 aa, synthetic construct
KTINGYLSPHRKAQNQQT

SEQ ID NO: 1218 - protein, 18 aa, synthetic construct
KTINGSGSPHSKVIRQQT

SEQ ID NO: 1219 - protein, 18 aa, synthetic construct
KTINGSGSPHFLLQNQQT

SEQ ID NO: 1220 - protein, 18 aa, synthetic construct
KTINGSGSPHSKARSKQT

SEQ ID NO: 1221 - protein, 18 aa, synthetic construct
KTINGVPSPHWKAQNQQT

SEQ ID NO: 1222 - protein, 18 aa, synthetic construct
KTINGSGSPHSKATRNQT

SEQ ID NO: 1223 - protein, 18 aa, synthetic construct
KTINGSGSPHSKACSAQT

SEQ ID NO: 1224 - protein, 18 aa, synthetic construct
KTINGSGSPHSKARYVQT

SEQ ID NO: 1225 - protein, 18 aa, synthetic construct
KTINGSRSPHARAQNQQT

SEQ ID NO: 1226 - protein, 18 aa, synthetic construct
KTINGSGSPHSKAQHLRT

SEQ ID NO: 1227 - protein, 18 aa, synthetic construct
KTINGSGSPHSKAKSRQT

SEQ ID NO: 1228 - protein, 18 aa, synthetic construct
KTINGSGSPHSKIGRQQT

SEQ ID NO: 1229 - protein, 18 aa, synthetic construct
KTINGLASPHRKAQNQQT

SEQ ID NO: 1230 - protein, 18 aa, synthetic construct
KTINGSGSPHSKARTRQT

SEQ ID NO: 1231 - protein, 18 aa, synthetic construct
KTINGSGSPHSKSIRQQT

SEQ ID NO: 1232 - protein, 18 aa, synthetic construct
KTINGSGSPHSKRLYQQT

SEQ ID NO: 1233 - protein, 18 aa, synthetic construct
KTINGLPSPHRKAQNQQT

SEQ ID NO: 1234 - protein, 18 aa, synthetic construct
KTINGSLSPHRRAQNQQT

SEQ ID NO: 1235 - protein, 18 aa, synthetic construct
KTINGKTSPHGKAQNQQT

SEQ ID NO: 1236 - protein, 18 aa, synthetic construct
KTINGSRSPHRLAQNQQT

SEQ ID NO: 1237 - protein, 18 aa, synthetic construct
KTINGSGSPHSLTWNQQT

SEQ ID NO: 1238 - protein, 18 aa, synthetic construct
KTINGSKSPHRKAQNQQT

SEQ ID NO: 1239 - protein, 18 aa, synthetic construct
KTINGSGSPHSKAQLRKT

SEQ ID NO: 1240 - protein, 18 aa, synthetic construct
KTINGSGSPHSKSRHQQT

SEQ ID NO: 1241 - protein, 18 aa, synthetic construct
KTINRRLSPHSKAQNQQT

SEQ ID NO: 1242 - protein, 18 aa, synthetic construct
KTINGSGSPHSRRVNQQT

SEQ ID NO: 1243 - protein, 18 aa, synthetic construct
KTINGSGSPHSHWQNQQT

SEQ ID NO: 1244 - protein, 18 aa, synthetic construct
KTTHCSGSPHSKAQNQQT

SEQ ID NO: 1245 - protein, 18 aa, synthetic construct
KTINGSGSPHSWLQNQQT

SEQ ID NO: 1246 - protein, 18 aa, synthetic construct
KTINGSTSPHYLAQNQQT

SEQ ID NO: 1247 - protein, 18 aa, synthetic construct
KTINGLTSPHRKAQNQQT

SEQ ID NO: 1248 - protein, 18 aa, synthetic construct
KTINGSGSPHSKRLLQQT

SEQ ID NO: 1249 - protein, 18 aa, synthetic construct
KTINGSGSPHSKLCVQQT

SEQ ID NO: 1250 - protein, 18 aa, synthetic construct
KTINGFLSPHRKAQNQQT

SEQ ID NO: 1251 - protein, 18 aa, synthetic construct
KTINGSGSPHSKMRPQQT

SEQ ID NO: 1252 - protein, 18 aa, synthetic construct
KTINGSGSPHSKQTRQQT

SEQ ID NO: 1253 - protein, 18 aa, synthetic construct
KTINGSGSPHSYLINQQT

SEQ ID NO: 1254 - protein, 18 aa, synthetic construct
KTINGSGSPHSKALRSQT

SEQ ID NO: 1255 - protein, 18 aa, synthetic construct
KTINGMLSPHRKAQNQQT

SEQ ID NO: 1256 - protein, 18 aa, synthetic construct
KTINGSGSPHSKCLTQQT

SEQ ID NO: 1257 - protein, 18 aa, synthetic construct
KTINGSGSPHSKAQLTLT

SEQ ID NO: 1258 - protein, 18 aa, synthetic construct
KTINGHSSPHRKAQNQQT

SEQ ID NO: 1259 - protein, 18 aa, synthetic construct
KTINGSGSPHLTWQNQQT

SEQ ID NO: 1260 - protein, 18 aa, synthetic construct
KTINGSGSPHSKAQYCLT

SEQ ID NO: 1261 - protein, 18 aa, synthetic construct
KTINGSGSPHSFLVNQQT

SEQ ID NO: 1262 - protein, 18 aa, synthetic construct
KTINMSRSPHSKAQNQQT

SEQ ID NO: 1263 - protein, 18 aa, synthetic construct
KTINGSGSPHSKAQLHRT

SEQ ID NO: 1264 - protein, 18 aa, synthetic construct
KTINGSGSPHLYMQNQQT

SEQ ID NO: 1265 - protein, 18 aa, synthetic construct
KTINGSRSPHRRAQNQQT

SEQ ID NO: 1266 - protein, 18 aa, synthetic construct
KTINGSGSPHSKAQNRRS

SEQ ID NO: 1267 - protein, 18 aa, synthetic construct
KTINLRFSPHSKAQNQQT

SEQ ID NO: 1268 - protein, 18 aa, synthetic construct
KTINGSGSPHSKAQRLWT

SEQ ID NO: 1269 - protein, 18 aa, synthetic construct
KTINGSGSPHSKGRAQQT

SEQ ID NO: 1270 - protein, 18 aa, synthetic construct
KTINGSGSPHSLSCNQQT

SEQ ID NO: 1271 - protein, 18 aa, synthetic construct
KTINGLVSPHCKAQNQQT

SEQ ID NO: 1272 - protein, 18 aa, synthetic construct
KTINGSSSPHLWAQNQQT

SEQ ID NO: 1273 - protein, 18 aa, synthetic construct
KTINGSGSPHSKAHRLQT

SEQ ID NO: 1274 - protein, 18 aa, synthetic construct
KTINGSGSPHPYAQNQQT

SEQ ID NO: 1275 - protein, 18 aa, synthetic construct
KTINGSGSPHSTRPNQQT

SEQ ID NO: 1276 - protein, 18 aa, synthetic construct
KTINGRSSPHPKAQNQQT

SEQ ID NO: 1277 - protein, 18 aa, synthetic construct
KTINGSGSPHSKAQSWRT

SEQ ID NO: 1278 - protein, 18 aa, synthetic construct
KTINGQRSPHVKAQNQQT

SEQ ID NO: 1279 - protein, 18 aa, synthetic construct
KTINGSGSPHSKAQFVRT

SEQ ID NO: 1280 - protein, 18 aa, synthetic construct
KTINGSGSPHSKCLNQQT

SEQ ID NO: 1281 - protein, 18 aa, synthetic construct
KTINGSGSPHSSLCNQQT

SEQ ID NO: 1282 - protein, 18 aa, synthetic construct
KTINGQRSPHSKAQNQQT

SEQ ID NO: 1283 - protein, 18 aa, synthetic construct
KTINGSGSPHSLSWNQQT

SEQ ID NO: 1284 - protein, 18 aa, synthetic construct
KTINGSGSPHSSRKNQQT

SEQ ID NO: 1285 - protein, 18 aa, synthetic construct
KTINGSGSPHSKRTLQQT

SEQ ID NO: 1286 - protein, 18 aa, synthetic construct
KTINGSLSPHCLAQNQQT

SEQ ID NO: 1287 - protein, 18 aa, synthetic construct
KTINGSGSPHSKAQSSRT

SEQ ID NO: 1288 - protein, 18 aa, synthetic construct
KTINGSGSPHLKRQNQQT

SEQ ID NO: 1289 - protein, 18 aa, synthetic construct
KTINGSGSPHSKARMGQT

SEQ ID NO: 1290 - protein, 18 aa, synthetic construct
KTINGSGSPHSKAQVKLT

SEQ ID NO: 1291 - protein, 18 aa, synthetic construct
KTINGSGSPHSKLPRQQT

SEQ ID NO: 1292 - protein, 18 aa, synthetic construct
KTINGSGSPHSKLCLQQT

SEQ ID NO: 1293 - protein, 18 aa, synthetic construct
KTINGSGSPHSPLWNQQT

SEQ ID NO: 1294 - protein, 18 aa, synthetic construct
KTINGSVSPHSWAQNQQT

SEQ ID NO: 1295 - protein, 18 aa, synthetic construct
KTIRSKGSPHSKAQNQQT

SEQ ID NO: 1296 - protein, 18 aa, synthetic construct
KTINGSRSPHSWAQNQQT

SEQ ID NO: 1297 - protein, 18 aa, synthetic construct
KTINGSGSPHSKILRQQT

SEQ ID NO: 1298 - protein, 18 aa, synthetic construct
KTINGRQSPHVKAQNQQT

SEQ ID NO: 1299 - protein, 18 aa, synthetic construct
KTINGSGSPHSKAQSIKT

SEQ ID NO: 1300 - protein, 18 aa, synthetic construct
KTINGSGSPHSKAQASKT

SEQ ID NO: 1301 - protein, 18 aa, synthetic construct
KTINGSGSPHSRLFNQQT

SEQ ID NO: 1302 - protein, 18 aa, synthetic construct
KTINGSGSPHIYLQNQQT

SEQ ID NO: 1303 - protein, 18 aa, synthetic construct
KTINGSGSPHSRVRNQQT

SEQ ID NO: 1304 - protein, 18 aa, synthetic construct
KTINGSGSPHSKAVRAQT

SEQ ID NO: 1305 - protein, 18 aa, synthetic construct
KTINGSGSPHSKPARQQT

SEQ ID NO: 1306 - protein, 18 aa, synthetic construct
KTINGSGSPHSRYSNQQT

SEQ ID NO: 1307 - protein, 18 aa, synthetic construct
KTINGSRSPHRSAQNQQT

SEQ ID NO: 1308 - protein, 18 aa, synthetic construct
KTINGSLSPHIYAQNQQT

SEQ ID NO: 1309 - protein, 18 aa, synthetic construct
KTINGSGSPHSKPVRQQT

SEQ ID NO: 1310 - protein, 18 aa, synthetic construct
KTINGMRSPHGKAQNQQT

SEQ ID NO: 1311 - protein, 18 aa, synthetic construct
KTINGSGSPHSKARITQT

SEQ ID NO: 1312 - protein, 18 aa, synthetic construct
KTINGSGSPHSWSLNQQT

SEQ ID NO: 1313 - protein, 18 aa, synthetic construct
KTINTSRSPHSKAQNQQT

SEQ ID NO: 1314 - protein, 18 aa, synthetic construct
KTINGSGSPHSKAFTRQT

SEQ ID NO: 1315 - protein, 18 aa, synthetic construct
KTINGSGSPHSKAVRNQT

SEQ ID NO: 1316 - protein, 18 aa, synthetic construct
KTINGSGSPHSKAQTNRT

SEQ ID NO: 1317 - protein, 18 aa, synthetic construct
KTINGSGSPHSKANRMQT

SEQ ID NO: 1318 - protein, 18 aa, synthetic construct
KTINGSGSPHSKAQLVLT

SEQ ID NO: 1319 - protein, 18 aa, synthetic construct
KTINGSGSPHSKATRQQT

SEQ ID NO: 1320 - protein, 18 aa, synthetic construct
KTINGSGSPHSKARGTQT

SEQ ID NO: 1321 - protein, 18 aa, synthetic construct
KTINGSGSPHSKAQWSVT

SEQ ID NO: 1322 - protein, 18 aa, synthetic construct
KTINGSGSPHSKAWLIQT

SEQ ID NO: 1323 - protein, 18 aa, synthetic construct
KTINGSGSPHSKAFRPQT

SEQ ID NO: 1324 - protein, 18 aa, synthetic construct
KTINGSGSPHRRSQNQQT

SEQ ID NO: 1325 - protein, 18 aa, synthetic construct
KTINGSGSPHSKGIRQQT

SEQ ID NO: 1326 - protein, 18 aa, synthetic construct
KTINGSGSPHCTLQNQQT

SEQ ID NO: 1327 - protein, 18 aa, synthetic construct
KPLPGSGSPHSKAQNQQT

SEQ ID NO: 1328 - protein, 18 aa, synthetic construct
KTINGSGSPHLVCQNQQT

SEQ ID NO: 1329 - protein, 18 aa, synthetic construct
KTINGSGSPHSKARGYQT

SEQ ID NO: 1330 - protein, 18 aa, synthetic construct
KTINGRISPHGKAQNQQT

SEQ ID NO: 1331 - protein, 18 aa, synthetic construct
KTINGSSSPHWLAQNQQT

SEQ ID NO: 1332 - protein, 18 aa, synthetic construct
KTINGSGSPHSKARMAQT

SEQ ID NO: 1333 - protein, 18 aa, synthetic construct
KPLDGSGSPHSKAQNQQT

SEQ ID NO: 1334 - protein, 18 aa, synthetic construct
KPLRGSGSPHSKAQNQQT

SEQ ID NO: 1335 - protein, 18 aa, synthetic construct
KTINGSGSPHSKAQNAKL

SEQ ID NO: 1336 - protein, 18 aa, synthetic construct
KTINGSGSPHSKLSKQQT

SEQ ID NO: 1337 - protein, 18 aa, synthetic construct
KTINGSGSPHSKARNGQT

SEQ ID NO: 1338 - protein, 18 aa, synthetic construct
KTINGSGSPHSKAQRRQT

SEQ ID NO: 1339 - protein, 18 aa, synthetic construct
KTINGSGSPHSKWPGQQT

SEQ ID NO: 1340 - protein, 18 aa, synthetic construct
KTINGSGSPHAFLQNQQT

SEQ ID NO: 1341 - protein, 18 aa, synthetic construct
KTINGILSPHRKAQNQQT

SEQ ID NO: 1342 - protein, 18 aa, synthetic construct
KTINGSGSPHSWGSNQQT

SEQ ID NO: 1343 - protein, 18 aa, synthetic construct
KTINGSGSPHSSCLNQQT

SEQ ID NO: 1344 - protein, 18 aa, synthetic construct
KTINGSGSPHSKAQSVKT

SEQ ID NO: 1345 - protein, 18 aa, synthetic construct
KTINGSGSPHSLRYNQQT

SEQ ID NO: 1346 - protein, 18 aa, synthetic construct
KTINGSGSPHSKARKLQT

SEQ ID NO: 1347 - protein, 18 aa, synthetic construct
KHRSGSGSPHSKAQNQQT

SEQ ID NO: 1348 - protein, 18 aa, synthetic construct
KTINGSGSPHSKWSLQQT

SEQ ID NO: 1349 - protein, 18 aa, synthetic construct
KTINGSGSPHSKAQTMRT

SEQ ID NO: 1350 - protein, 18 aa, synthetic construct
KTINGSGSPHSKTIRQQT

SEQ ID NO: 1351 - protein, 18 aa, synthetic construct
KTINGKLSPHMKAQNQQT

SEQ ID NO: 1352 - protein, 18 aa, synthetic construct
KTINGSGSPHSKARPFQT

SEQ ID NO: 1353 - protein, 18 aa, synthetic construct
KTINGSGSPHSKPRVQQT

SEQ ID NO: 1354 - protein, 18 aa, synthetic construct
KTINGSGSPHSKAQVVLT

SEQ ID NO: 1355 - protein, 18 aa, synthetic construct
KTRRSSGSPHSKAQNQQT

SEQ ID NO: 1356 - protein, 18 aa, synthetic construct
KTINGSGSPHSKPSRQQT

SEQ ID NO: 1357 - protein, 18 aa, synthetic construct
KTINGSGSPHSVYRNQQT

SEQ ID NO: 1358 - protein, 18 aa, synthetic construct
KTINGSGSPHSKTCSQQT

SEQ ID NO: 1359 - protein, 18 aa, synthetic construct
KTINGSPSPHRKAQNQQT

SEQ ID NO: 1360 - protein, 18 aa, synthetic construct
KTINGRSSPHFKAQNQQT

SEQ ID NO: 1361 - protein, 18 aa, synthetic construct
KTINGSGSPHSKAQMVRT

SEQ ID NO: 1362 - protein, 18 aa, synthetic construct
KTINGSRSPHCSAQNQQT

SEQ ID NO: 1363 - protein, 18 aa, synthetic construct
KTINGSCSPHLRAQNQQT

SEQ ID NO: 1364 - protein, 18 aa, synthetic construct
KTINGSGSPHSKAQCLFT

SEQ ID NO: 1365 - protein, 18 aa, synthetic construct
KTINGRPSPHVKAQNQQT

SEQ ID NO: 1366 - protein, 18 aa, synthetic construct
KTINGSGSPHSMFPNQQT

SEQ ID NO: 1367 - protein, 18 aa, synthetic construct
KTINGMKSPHSKAQNQQT

SEQ ID NO: 1368 - protein, 18 aa, synthetic construct
KTINGSGSPHSKVRAQQT

SEQ ID NO: 1369 - protein, 18 aa, synthetic construct
KGLVGSGSPHSKAQNQQT

SEQ ID NO: 1370 - protein, 18 aa, synthetic construct
KTINGSRSPHVRAQNQQT

SEQ ID NO: 1371 - protein, 18 aa, synthetic construct
KTIRLRGSPHSKAQNQQT

SEQ ID NO: 1372 - protein, 18 aa, synthetic construct
KPRLGSGSPHSKAQNQQT

SEQ ID NO: 1373 - protein, 18 aa, synthetic construct
KTINGSGSPHSKAWYPQT

SEQ ID NO: 1374 - protein, 18 aa, synthetic construct
KTINGSCSPHVRAQNQQT

SEQ ID NO: 1375 - protein, 18 aa, synthetic construct
KTINGSGSPHSKRNVQQT

SEQ ID NO: 1376 - protein, 18 aa, synthetic construct
KTINGSGSPHSKRGLQQT

SEQ ID NO: 1377 - protein, 18 aa, synthetic construct
KTINGSGSPHSKRLAQQT

SEQ ID NO: 1378 - protein, 18 aa, synthetic construct
KTINGSGSPHSKVTRQQT

SEQ ID NO: 1379 - protein, 18 aa, synthetic construct
KTINGSGSPHTWLQNQQT

SEQ ID NO: 1380 - protein, 18 aa, synthetic construct
KTINGSGSPHSKQRSQQT

SEQ ID NO: 1381 - protein, 18 aa, synthetic construct
KTINGSGSPHSKAQRCST

SEQ ID NO: 1382 - protein, 18 aa, synthetic construct
KTINGSPSPHYLAQNQQT

SEQ ID NO: 1383 - protein, 18 aa, synthetic construct
KTINGRRSPHLKAQNQQT

SEQ ID NO: 1384 - protein, 18 aa, synthetic construct
KTINGSGSPHWSLQNQQT

SEQ ID NO: 1385 - protein, 18 aa, synthetic construct
KTINGVTSPHWKAQNQQT

SEQ ID NO: 1386 - protein, 18 aa, synthetic construct
KTINGSGSPHSKAQTTRT

SEQ ID NO: 1387 - protein, 18 aa, synthetic construct
KTINGSGSPHSKAQLFKT

SEQ ID NO: 1388 - protein, 18 aa, synthetic construct
KTINGSGSPHSKARSYQT

SEQ ID NO: 1389 - protein, 18 aa, synthetic construct
KTINGSGSPHSKLSRQQT

SEQ ID NO: 1390 - protein, 18 aa, synthetic construct
KTINGSGSPHLVFQNQQT

SEQ ID NO: 1391 - protein, 18 aa, synthetic construct
KTINGSGSPHSKAQLVKT

SEQ ID NO: 1392 - protein, 18 aa, synthetic construct
KTINGSGSPHSKAQTGRT

SEQ ID NO: 1393 - protein, 18 aa, synthetic construct
KTINGSGSPHSKARYSQT

SEQ ID NO: 1394 - protein, 18 aa, synthetic construct
KTINGRHSPHLKAQNQQT

SEQ ID NO: 1395 - protein, 18 aa, synthetic construct
KTINGSGSPHSFARNQQT

SEQ ID NO: 1396 - protein, 18 aa, synthetic construct
KTINGSGSPHSSCQNQQT

SEQ ID NO: 1397 - protein, 18 aa, synthetic construct
KTINGSGSPHSLFANQQT

SEQ ID NO: 1398 - protein, 18 aa, synthetic construct
KTINGSGSPHSKRLTQQT

SEQ ID NO: 1399 - protein, 18 aa, synthetic construct
KTINGSGSPHSKAQTART

SEQ ID NO: 1400 - protein, 18 aa, synthetic construct
KTINGSGSPHFLNQNQQT

SEQ ID NO: 1401 - protein, 18 aa, synthetic construct
KTINGSGSPHSKAQLILT

SEQ ID NO: 1402 - protein, 18 aa, synthetic construct
KEVGGSGSPHSKAQNQQT

SEQ ID NO: 1403 - protein, 18 aa, synthetic construct
KTINGSRSPHIRAQNQQT

SEQ ID NO: 1404 - protein, 18 aa, synthetic construct
KTINGSGSPHSSWLNQQT

SEQ ID NO: 1405 - protein, 18 aa, synthetic construct
KTINGSMSPHLYAQNQQT

SEQ ID NO: 1406 - protein, 18 aa, synthetic construct
KTINGMSSPHRKAQNQQT

SEQ ID NO: 1407 - protein, 18 aa, synthetic construct
KTINGSGSPHSKPRPQQT

SEQ ID NO: 1408 - protein, 18 aa, synthetic construct
KTINGSGSPHSGLWNQQT

SEQ ID NO: 1409 - protein, 18 aa, synthetic construct
KTINGSGSPHRWAQNQQT

SEQ ID NO: 1410 - protein, 18 aa, synthetic construct
KTINGSGSPHSKIRLQQT

SEQ ID NO: 1411 - protein, 18 aa, synthetic construct
KTINGSGSPHSKFSCQQT

SEQ ID NO: 1412 - protein, 18 aa, synthetic construct
KTINGSGSPHSKSCAQQT

SEQ ID NO: 1413 - protein, 18 aa, synthetic construct
KTINGSGSPHSKRLMQQT

SEQ ID NO: 1414 - protein, 18 aa, synthetic construct
KTSRCSGSPHSKAQNQQT

SEQ ID NO: 1415 - protein, 18 aa, synthetic construct
KTINGSGSPHSFLLNQQT

SEQ ID NO: 1416 - protein, 18 aa, synthetic construct
KTINGSGSPHCSAQNQQT

SEQ ID NO: 1417 - protein, 18 aa, synthetic construct
KTINGSGSPHSKAQPSKT

SEQ ID NO: 1418 - protein, 18 aa, synthetic construct
KTINGSGSPHSYVRNQQT

SEQ ID NO: 1419 - protein, 18 aa, synthetic construct
KTINGSGSPHSKAQQSRT

SEQ ID NO: 1420 - protein, 18 aa, synthetic construct
KTINGSGSPHSFVVNQQT

SEQ ID NO: 1421 - protein, 18 aa, synthetic construct
KTINGFRSPHSKAQNQQT

SEQ ID NO: 1422 - protein, 18 aa, synthetic construct
KTINGSGSPHSKWLVQQT

SEQ ID NO: 1423 - protein, 18 aa, synthetic construct
KTINGSGSPHSKRTAQQT

SEQ ID NO: 1424 - protein, 18 aa, synthetic construct
KTINGLFSPHRKAQNQQT

SEQ ID NO: 1425 - protein, 18 aa, synthetic construct
KTINTIESPHSKAQNQQT

SEQ ID NO: 1426 - protein, 18 aa, synthetic construct
KRLFGSGSPHSKAQNQQT

SEQ ID NO: 1427 - protein, 18 aa, synthetic construct
KTINGSGSPHSKAPNHLT

SEQ ID NO: 1428 - protein, 18 aa, synthetic construct
KTINGSGSPHLFRQNQQT

SEQ ID NO: 1429 - protein, 18 aa, synthetic construct
KTINGSGSPHSKASRHQT

SEQ ID NO: 1430 - protein, 18 aa, synthetic construct
KTINGSGSPHSKLSWQQT

SEQ ID NO: 1431 - protein, 18 aa, synthetic construct
KETAGSGSPHSKAQNQQT

SEQ ID NO: 1432 - protein, 18 aa, synthetic construct
KTINGHRSPHLKAQNQQT

SEQ ID NO: 1433 - protein, 18 aa, synthetic construct
KTINGSGSPHSKGCLQQT

SEQ ID NO: 1434 - protein, 18 aa, synthetic construct
KTINGSGSPHSKAQVLIT

SEQ ID NO: 1435 - protein, 18 aa, synthetic construct
KTINGSGSPHSKLRSQQT

SEQ ID NO: 1436 - protein, 18 aa, synthetic construct
KTINGTLSPHRKAQNQQT

SEQ ID NO: 1437 - protein, 18 aa, synthetic construct
KTINGSGSPHSTWTNQQT

SEQ ID NO: 1438 - protein, 18 aa, synthetic construct
KTINGSGSPHSKAQCRLT

SEQ ID NO: 1439 - protein, 18 aa, synthetic construct
KTINNLRSPHSKAQNQQT

SEQ ID NO: 1440 - protein, 18 aa, synthetic construct
KTINGSGSPHSKARANQT

SEQ ID NO: 1441 - protein, 18 aa, synthetic construct
KTINGRQSPHTKAQNQQT

SEQ ID NO: 1442 - protein, 18 aa, synthetic construct
KTINSARSPHSKAQNQQT

SEQ ID NO: 1443 - protein, 18 aa, synthetic construct
KTINGCSSPHRKAQNQQT

SEQ ID NO: 1444 - protein, 18 aa, synthetic construct
KTINGSVSPHFMAQNQQT

SEQ ID NO: 1445 - protein, 18 aa, synthetic construct
KTINGSGSPHSLCQNQQT

SEQ ID NO: 1446 - protein, 18 aa, synthetic construct
KTINGSLSPHLFAQNQQT

SEQ ID NO: 1447 - protein, 18 aa, synthetic construct
KTINGSGSPHSKACPLQT

SEQ ID NO: 1448 - protein, 18 aa, synthetic construct
KTINGRTSPHRKAQNQQT

SEQ ID NO: 1449 - protein, 18 aa, synthetic construct
KTINGSGSPHSKRATQQT

SEQ ID NO: 1450 - protein, 18 aa, synthetic construct
KTINGSGSPHSKARIMQT

SEQ ID NO: 1451 - protein, 18 aa, synthetic construct
KTINGSGSPHVTWQNQQT

SEQ ID NO: 1452 - protein, 18 aa, synthetic construct
KTINGSGSPHSKRLPQQT

SEQ ID NO: 1453 - protein, 18 aa, synthetic construct
KTINGSGSPHSKAQGFRT

SEQ ID NO: 1454 - protein, 18 aa, synthetic construct
KTINGSGSPHLYGQNQQT

SEQ ID NO: 1455 - protein, 18 aa, synthetic construct
KTINGSGSPHLSCQNQQT

SEQ ID NO: 1456 - protein, 18 aa, synthetic construct
KTINGSGSPHSKAQFTLT

SEQ ID NO: 1457 - protein, 18 aa, synthetic construct
KTINGSRSPHFKAQNQQT

SEQ ID NO: 1458 - protein, 18 aa, synthetic construct
KTINGRPSPHSKAQNQQT

SEQ ID NO: 1459 - protein, 18 aa, synthetic construct
KTINGFSSPHRKAQNQQT

SEQ ID NO: 1460 - protein, 18 aa, synthetic construct
KTINGRASPHVKAQNQQT

SEQ ID NO: 1461 - protein, 18 aa, synthetic construct
KTINGSGSPHSKAQNEVH

SEQ ID NO: 1462 - protein, 18 aa, synthetic construct
KTINGSGSPHSKRSLQQT

SEQ ID NO: 1463 - protein, 18 aa, synthetic construct
KTINGSGSPHRSRQNQQT

SEQ ID NO: 1464 - protein, 18 aa, synthetic construct
KPPTGSGSPHSKAQNQQT

SEQ ID NO: 1465 - protein, 18 aa, synthetic construct
KTINGSGSPHSKAARTQT

SEQ ID NO: 1466 - protein, 18 aa, synthetic construct
KTINGSGSPHSSWANQQT

SEQ ID NO: 1467 - protein, 18 aa, synthetic construct
KTINGSGSPHSKAQRHAT

SEQ ID NO: 1468 - protein, 18 aa, synthetic construct
KTINSPRSPHSKAQNQQT

SEQ ID NO: 1469 - protein, 18 aa, synthetic construct
KTINGSGSPHSKSERQQT

SEQ ID NO: 1470 - protein, 18 aa, synthetic construct
KTINGSGSPHALFQNQQT

SEQ ID NO: 1471 - protein, 18 aa, synthetic construct
KTINGSGSPHSKAQCYVT

SEQ ID NO: 1472 - protein, 18 aa, synthetic construct
KTINGVASPHRKAQNQQT

SEQ ID NO: 1473 - protein, 18 aa, synthetic construct
KTINGSGSPHSALWNQQT

SEQ ID NO: 1474 - protein, 18 aa, synthetic construct
KTINGSGSPHSKSVRQQT

SEQ ID NO: 1475 - protein, 18 aa, synthetic construct
KTINGSGSPHSHMENQQT

SEQ ID NO: 1476 - protein, 18 aa, synthetic construct
KTINGSGTPHSKAQNQQT

SEQ ID NO: 1477 - protein, 18 aa, synthetic construct
KTINGSGSPHSKTGRQQT

SEQ ID NO: 1478 - protein, 18 aa, synthetic construct
KTINGSGSPHSKAQANRT

SEQ ID NO: 1479 - protein, 18 aa, synthetic construct
KTINGSGSPHSKARFSQT

SEQ ID NO: 1480 - protein, 18 aa, synthetic construct
KYLLGSGSPHSKAQNQQT

SEQ ID NO: 1481 - protein, 18 aa, synthetic construct
KTINGSGSPHCSSQNQQT

SEQ ID NO: 1482 - protein, 18 aa, synthetic construct
KTINGSMSPHRKAQNQQT

SEQ ID NO: 1483 - protein, 18 aa, synthetic construct
KTINGNLSPHRKAQNQQT

SEQ ID NO: 1484 - protein, 18 aa, synthetic construct
KEVAGSGSPHSKAQNQQT

SEQ ID NO: 1485 - protein, 18 aa, synthetic construct
KTINLSRSPHSKAQNQQT

SEQ ID NO: 1486 - protein, 18 aa, synthetic construct
KTINGSGSPHSKARQQQT

SEQ ID NO: 1487 - protein, 18 aa, synthetic construct
KTINGTPSPHRKAQNQQT

SEQ ID NO: 1488 - protein, 18 aa, synthetic construct
KTINGSGSPHSKFKLQQT

SEQ ID NO: 1489 - protein, 18 aa, synthetic construct
KTINGSGSPHSKAWLLQT

SEQ ID NO: 1490 - protein, 18 aa, synthetic construct
KTINGLRSPHSKAQNQQT

SEQ ID NO: 1491 - protein, 18 aa, synthetic construct
KTINGRLSPHRKAQNQQT

SEQ ID NO: 1492 - protein, 18 aa, synthetic construct
KTINGSPSPHLFAQNQQT

SEQ ID NO: 1493 - protein, 18 aa, synthetic construct
KDLRGSGSPHSKAQNQQT

SEQ ID NO: 1494 - protein, 18 aa, synthetic construct
KTINGSGSPHSKAQLAKT

SEQ ID NO: 1495 - protein, 18 aa, synthetic construct
KTINGSGSPHSKPRSQQT

SEQ ID NO: 1496 - protein, 18 aa, synthetic construct
KTINGSGSPHSKKMSQQT

SEQ ID NO: 1497 - protein, 18 aa, synthetic construct
KTINGSGSPHSKAQLIVT

SEQ ID NO: 1498 - protein, 18 aa, synthetic construct
KTINGSGSPHSKARFTQT

SEQ ID NO: 1499 - protein, 18 aa, synthetic construct
KTINGSGSPHPLFQNQQT

SEQ ID NO: 1500 - protein, 18 aa, synthetic construct
KTINGSGSPHSKAQRGMT

SEQ ID NO: 1501 - protein, 18 aa, synthetic construct
KTINGSGSPHSKAQNLRR

SEQ ID NO: 1502 - protein, 18 aa, synthetic construct
KTINGSGSPHSKAQFRVT

SEQ ID NO: 1503 - protein, 18 aa, synthetic construct
KTINGSGSPHSKAFVRQT

SEQ ID NO: 1504 - protein, 18 aa, synthetic construct
KTINGSGSPHSKARLTQT

SEQ ID NO: 1505 - protein, 18 aa, synthetic construct
KTINGSGSPHRFKQNQQT

SEQ ID NO: 1506 - protein, 18 aa, synthetic construct
KTINGSGSPHSKEETQQT

SEQ ID NO: 1507 - protein, 18 aa, synthetic construct
KTINGSGSPHSKTRAQQT

SEQ ID NO: 1508 - protein, 18 aa, synthetic construct
KTINGSGSPHSVSWNQQT

SEQ ID NO: 1509 - protein, 18 aa, synthetic construct
KTINGSGSPHTKWQNQQT

SEQ ID NO: 1510 - protein, 18 aa, synthetic construct
KTINGSNSPHRKAQNQQT

SEQ ID NO: 1511 - protein, 18 aa, synthetic construct
KTINGSGSPHSKAQNKRS

SEQ ID NO: 1512 - protein, 18 aa, synthetic construct
KTINGSGSPHSTRQNQQT

SEQ ID NO: 1513 - protein, 18 aa, synthetic construct
KTINGTRSPHTKAQNQQT

SEQ ID NO: 1514 - protein, 18 aa, synthetic construct
KTINGSGSPHVLFQNQQT

SEQ ID NO: 1515 - protein, 18 aa, synthetic construct
KTINGSVSPHYLAQNQQT

SEQ ID NO: 1516 - protein, 18 aa, synthetic construct
KTINGALSPHRKAQNQQT

SEQ ID NO: 1517 - protein, 18 aa, synthetic construct
KTINGSGSPHSKARLYQT

SEQ ID NO: 1518 - protein, 18 aa, synthetic construct
KTINGSGSPHEHNQNQQT

SEQ ID NO: 1519 - protein, 18 aa, synthetic construct
KTINGVLSPHWKAQNQQT

SEQ ID NO: 1520 - protein, 18 aa, synthetic construct
KTINGSGSPHSKASRQQT

SEQ ID NO: 1521 - protein, 18 aa, synthetic construct
KTINGSGSPHSKRSFQQT

SEQ ID NO: 1522 - protein, 18 aa, synthetic construct
KTINGSGSPHSKRVSQQT

SEQ ID NO: 1523 - protein, 18 aa, synthetic construct
KTINGSGSPHSYSRNQQT

SEQ ID NO: 1524 - protein, 18 aa, synthetic construct
KTINGSGSPHSTVWNQQT

SEQ ID NO: 1525 - protein, 18 aa, synthetic construct
KTINGSGSPHSVLFNQQT

SEQ ID NO: 1526 - protein, 18 aa, synthetic construct
KTINGPLSPHCKAQNQQT

SEQ ID NO: 1527 - protein, 18 aa, synthetic construct
KTINGSGSPHSKRVGQQT

SEQ ID NO: 1528 - protein, 18 aa, synthetic construct
KTINGSGSPHSKLWSQQT

SEQ ID NO: 1529 - protein, 18 aa, synthetic construct
KTINGSGSPHSKAQGVRT

SEQ ID NO: 1530 - protein, 18 aa, synthetic construct
KTINGSVSPHRRAQNQQT

SEQ ID NO: 1531 - protein, 18 aa, synthetic construct
KTINGSGSPHLRFQNQQT

SEQ ID NO: 1532 - protein, 18 aa, synthetic construct
KTINGSASPHVFAQNQQT

SEQ ID NO: 1533 - protein, 18 aa, synthetic construct
KTWVRSGSPHSKAQNQQT

SEQ ID NO: 1534 - protein, 18 aa, synthetic construct
KTINGSGSPHSKARMQQT

SEQ ID NO: 1535 - protein, 18 aa, synthetic construct
KTINGSGSPHSKASRGQT

SEQ ID NO: 1536 - protein, 18 aa, synthetic construct
KTINGSGSPHSKAQVCLT

SEQ ID NO: 1537 - protein, 18 aa, synthetic construct
KTINGSGSPHSKARGVQT

SEQ ID NO: 1538 - protein, 18 aa, synthetic construct
KTINGSGSPHGLWQNQQT

SEQ ID NO: 1539 - protein, 18 aa, synthetic construct
KTINGSGSPHSKAQVWFT

SEQ ID NO: 1540 - protein, 18 aa, synthetic construct
KTINGSGSPHSKAQVTLT

SEQ ID NO: 1541 - protein, 18 aa, synthetic construct
KTINGSGSPHSKAQLRIT

SEQ ID NO: 1542 - protein, 18 aa, synthetic construct
KDSLGSGSPHSKAQNQQT

SEQ ID NO: 1543 - protein, 18 aa, synthetic construct
KTINGSGSPHSKRASQQT

SEQ ID NO: 1544 - protein, 18 aa, synthetic construct
KTINGSGSPHSKRINQQT

SEQ ID NO: 1545 - protein, 18 aa, synthetic construct
KTINGSGSPHSKASKNQT

SEQ ID NO: 1546 - protein, 18 aa, synthetic construct
KTINGSGSPHSKAQLPWT

SEQ ID NO: 1547 - protein, 18 aa, synthetic construct
KTINGSGSPHSKLTRQQT

SEQ ID NO: 1548 - protein, 18 aa, synthetic construct
KTINGSGSPHSKTNRQQT

SEQ ID NO: 1549 - protein, 18 aa, synthetic construct
KTINRVISPHSKAQNQQT

SEQ ID NO: 1550 - protein, 18 aa, synthetic construct
KTINGSGSPHTLWQNQQT

SEQ ID NO: 1551 - protein, 18 aa, synthetic construct
KTINGSGSPHSRRQNQQT

SEQ ID NO: 1552 - protein, 18 aa, synthetic construct
KTINGSGSPHSKGGRQQT

SEQ ID NO: 1553 - protein, 18 aa, synthetic construct
KTINGSESPHDSAQNQQT

SEQ ID NO: 1554 - protein, 18 aa, synthetic construct
KTINGSGSPHSRPRNQQT

SEQ ID NO: 1555 - protein, 18 aa, synthetic construct
KTINGSGSPHSRKQNQQT

SEQ ID NO: 1556 - protein, 18 aa, synthetic construct
KTINGSGSPHSKAQEELT

SEQ ID NO: 1557 - protein, 18 aa, synthetic construct
KTINGWRSPHSKAQNQQT

SEQ ID NO: 1558 - protein, 18 aa, synthetic construct
KTINGSGSPHSLLYNQQT

SEQ ID NO: 1559 - protein, 18 aa, synthetic construct
KTINGSGSPHSFRLNQQT

SEQ ID NO: 1560 - protein, 18 aa, synthetic construct
KTINGSGSPHSKAQFLRT

SEQ ID NO: 1561 - protein, 18 aa, synthetic construct
KTINGSGSPHSKQSRQQT

SEQ ID NO: 1562 - protein, 18 aa, synthetic construct
KTINGSRSPHSKAQNRQT

SEQ ID NO: 1563 - protein, 18 aa, synthetic construct
KTINGRPSPHIKAQNQQT

SEQ ID NO: 1564 - protein, 18 aa, synthetic construct
KTINGSGSPHSKRLVQQT

SEQ ID NO: 1565 - protein, 18 aa, synthetic construct
KGHEGSGSPHSKAQNQQT

SEQ ID NO: 1566 - protein, 18 aa, synthetic construct
KTINGSGSPHSKAQKRST

SEQ ID NO: 1567 - protein, 18 aa, synthetic construct
KTINGSGSPHSYLLNQQT

SEQ ID NO: 1568 - protein, 18 aa, synthetic construct
KTINGSGSPHSKPRGQQT

SEQ ID NO: 1569 - protein, 18 aa, synthetic construct
KTINGSGSPHSKTRLQQT

SEQ ID NO: 1570 - protein, 18 aa, synthetic construct
KTINGSGSPHSKSHRQQT

SEQ ID NO: 1571 - protein, 18 aa, synthetic construct
KEIKGSGSPHSKAQNQQT

SEQ ID NO: 1572 - protein, 18 aa, synthetic construct
KTINGSGSPHSKARGIQT

SEQ ID NO: 1573 - protein, 18 aa, synthetic construct
KTINGYRSPHSKAQNQQT

SEQ ID NO: 1574 - protein, 18 aa, synthetic construct
KTINGSGSPHSKLWTQQT

SEQ ID NO: 1575 - protein, 18 aa, synthetic construct
KTINGSGSPHSKPWLQQT

SEQ ID NO: 1576 - protein, 18 aa, synthetic construct
KTINGSGSPHWSVQNQQT

SEQ ID NO: 1577 - protein, 18 aa, synthetic construct
KTINGSGSPHSKVARQQT

SEQ ID NO: 1578 - protein, 18 aa, synthetic construct
KTINGSGSPHTLFQNQQT

SEQ ID NO: 1579 - protein, 18 aa, synthetic construct
KTINGSCSPHLAAQNQQT

SEQ ID NO: 1580 - protein, 18 aa, synthetic construct
KTINGSGSPHSKTSRQQT

SEQ ID NO: 1581 - protein, 18 aa, synthetic construct
KTINGSGSPHSKAQNARH

SEQ ID NO: 1582 - protein, 18 aa, synthetic construct
KTINGSGSPHSKAQLKLT

SEQ ID NO: 1583 - protein, 18 aa, synthetic construct
KTINGSGSPHSKAQNWRT

SEQ ID NO: 1584 - protein, 18 aa, synthetic construct
KTINGSGSPHFLPQNQQT

SEQ ID NO: 1585 - protein, 18 aa, synthetic construct
KTINGSGSPHSKNVRQQT

SEQ ID NO: 1586 - protein, 18 aa, synthetic construct
KTINGSGSPHFMRQNQQT

SEQ ID NO: 1587 - protein, 18 aa, synthetic construct
KTINGSGSPHGWAQNQQT

SEQ ID NO: 1588 - protein, 18 aa, synthetic construct
KTINGSGSPHFHLQNQQT

SEQ ID NO: 1589 - protein, 18 aa, synthetic construct
KTINGSASPHWSAQNQQT

SEQ ID NO: 1590 - protein, 18 aa, synthetic construct
KTINGSSSPHSWAQNQQT

SEQ ID NO: 1591 - protein, 18 aa, synthetic construct
KTINGSGSPHSKAHRQQT

SEQ ID NO: 1592 - protein, 18 aa, synthetic construct
KTINGSGSPHSKQRVQQT

SEQ ID NO: 1593 - protein, 18 aa, synthetic construct
KTLRRSGSPHSKAQNQQT

SEQ ID NO: 1594 - protein, 18 aa, synthetic construct
KTINGSGSPHSKGVRQQT

SEQ ID NO: 1595 - protein, 18 aa, synthetic construct
KTINGSLSPHTWAQNQQT

SEQ ID NO: 1596 - protein, 18 aa, synthetic construct
KTINGSGSPHSKRALQQT

SEQ ID NO: 1597 - protein, 18 aa, synthetic construct
KTINGSGSPHCLSQNQQT

SEQ ID NO: 1598 - protein, 18 aa, synthetic construct
KTINGSGSPHSKAQSLKT

SEQ ID NO: 1599 - protein, 18 aa, synthetic construct
KTINGSGSPHSFVRNQQT

SEQ ID NO: 1600 - protein, 18 aa, synthetic construct
KTINGSGSPHSIFSNQQT

SEQ ID NO: 1601 - protein, 18 aa, synthetic construct
KTINGSGSPHSKVSRQQT

SEQ ID NO: 1602 - protein, 18 aa, synthetic construct
KTINGSGSPHSKARNKQT

SEQ ID NO: 1603 - protein, 18 aa, synthetic construct
KTINASGSPHSKAQGQQT

SEQ ID NO: 1604 - protein, 18 aa, synthetic construct
KTINGSGSPHSKLRMQQT

SEQ ID NO: 1605 - protein, 18 aa, synthetic construct
KTINGSWSPHMLAQNQQT

SEQ ID NO: 1606 - protein, 18 aa, synthetic construct
KTINGSGSPHSLFPNQQT

SEQ ID NO: 1607 - protein, 18 aa, synthetic construct
KPPLGSGSPHSKAQNQQT

SEQ ID NO: 1608 - protein, 18 aa, synthetic construct
KTINGIASPHRKAQNQQT

SEQ ID NO: 1609 - protein, 18 aa, synthetic construct
KTINGSCSPHSLAQNQQT

SEQ ID NO: 1610 - protein, 18 aa, synthetic construct
KTINGRLSPHFKAQNQQT

SEQ ID NO: 1611 - protein, 18 aa, synthetic construct
KTINGSGSPHSKARMTQT

SEQ ID NO: 1612 - protein, 18 aa, synthetic construct
KTINGSGSPHSKARLQQT

SEQ ID NO: 1613 - protein, 18 aa, synthetic construct
KTINGSGSPHSKWVSQQT

SEQ ID NO: 1614 - protein, 18 aa, synthetic construct
KTINGSGSPHSKKVSQQT

SEQ ID NO: 1615 - protein, 18 aa, synthetic construct
KTINGSGSPHSKAQSYRT

SEQ ID NO: 1616 - protein, 18 aa, synthetic construct
KAFNGSGSPHSKAPNQQT

SEQ ID NO: 1617 - protein, 18 aa, synthetic construct
KTINGSGSPHSKAQYRLT

SEQ ID NO: 1618 - protein, 18 aa, synthetic construct
KTINGSWSPHLVAQNQQT

SEQ ID NO: 1619 - protein, 18 aa, synthetic construct
KTINGSGSPHSWTQNQQT

SEQ ID NO: 1620 - protein, 18 aa, synthetic construct
KTINGSGSPHSKAQSHRT

SEQ ID NO: 1621 - protein, 18 aa, synthetic construct
KGINGSGSPHGKAQNQQT

SEQ ID NO: 1622 - protein, 18 aa, synthetic construct
KTINGSGSPHSKAQNRKL

SEQ ID NO: 1623 - protein, 18 aa, synthetic construct
KTINGRYSPHSKAQNQQT

SEQ ID NO: 1624 - protein, 18 aa, synthetic construct
KTINGSGSPHSKGRSQQT

SEQ ID NO: 1625 - protein, 18 aa, synthetic construct
KTINGSGSPHCVAQNQQT

SEQ ID NO: 1626 - protein, 18 aa, synthetic construct
KTINGSGSPHSKIRPQQT

SEQ ID NO: 1627 - protein, 18 aa, synthetic construct
KTINGSGSPHSKAQSSKT

SEQ ID NO: 1628 - protein, 18 aa, synthetic construct
KTINGSGSPHSKRPFQQT

SEQ ID NO: 1629 - protein, 18 aa, synthetic construct
KTINGSSSPHCLAQNQQT

SEQ ID NO: 1630 - protein, 18 aa, synthetic construct
KTINGTRSPHAKAQNQQT

SEQ ID NO: 1631 - protein, 18 aa, synthetic construct
KTINGSGSPHLLFQNQQT

SEQ ID NO: 1632 - protein, 18 aa, synthetic construct
KTINGRRSPHTKAQNQQT

SEQ ID NO: 1633 - protein, 18 aa, synthetic construct
KTINGSGSPHSKASKQQT

SEQ ID NO: 1634 - protein, 18 aa, synthetic construct
KTINGSGSPHSKAQLGRT

SEQ ID NO: 1635 - protein, 18 aa, synthetic construct
KTINGSGSPHSVFLNQQT

SEQ ID NO: 1636 - protein, 18 aa, synthetic construct
KTINGSGSPHSKSARQQT

SEQ ID NO: 1637 - protein, 18 aa, synthetic construct
KTINGSGSPHSKLRLQQT

SEQ ID NO: 1638 - protein, 18 aa, synthetic construct
KTRKSSGSPHSKAQNQQT

SEQ ID NO: 1639 - protein, 18 aa, synthetic construct
KTINGFRSPHLKAQNQQT

SEQ ID NO: 1640 - protein, 18 aa, synthetic construct
KTINGSGSPHSKRSIQQT

SEQ ID NO: 1641 - protein, 18 aa, synthetic construct
KTINGSGSPHSKGRIQQT

SEQ ID NO: 1642 - protein, 18 aa, synthetic construct
KTINGSRSPHRPAQNQQT

SEQ ID NO: 1643 - protein, 18 aa, synthetic construct
KTINGSGSPHSKLRPQQT

SEQ ID NO: 1644 - protein, 18 aa, synthetic construct
KTINGSGSPHMYAQNQQT

SEQ ID NO: 1645 - protein, 18 aa, synthetic construct
KTINGRTSPHAKAQNQQT

SEQ ID NO: 1646 - protein, 18 aa, synthetic construct
KTINGSGSPHSKAGRGQT

SEQ ID NO: 1647 - protein, 18 aa, synthetic construct
KTINGSGSPHSKLMRQQT

SEQ ID NO: 1648 - protein, 18 aa, synthetic construct
KTINGSGSPHSKANKSQT

SEQ ID NO: 1649 - protein, 18 aa, synthetic construct
KTINGSGSPHSKAVRQQT

SEQ ID NO: 1650 - protein, 18 aa, synthetic construct
KTINGSGSPHSKCLSQQT

SEQ ID NO: 1651 - protein, 18 aa, synthetic construct
KTINGSGSPHSKAQWVLT

SEQ ID NO: 1652 - protein, 18 aa, synthetic construct
KTINGSGSPHSKAQFWVT

SEQ ID NO: 1653 - protein, 18 aa, synthetic construct
KTINGSGSPHSKALCRQT

SEQ ID NO: 1654 - protein, 18 aa, synthetic construct
KEVMGSGSPHSKAQNQQT

SEQ ID NO: 1655 - protein, 18 aa, synthetic construct
KTINGSGSPHSKNTRQQT

SEQ ID NO: 1656 - protein, 18 aa, synthetic construct
KTINGSGSPHTWTQNQQT

SEQ ID NO: 1657 - protein, 18 aa, synthetic construct
KTINGSTSPHWSAQNQQT

SEQ ID NO: 1658 - protein, 18 aa, synthetic construct
KTINGNVSPHRKAQNQQT

SEQ ID NO: 1659 - protein, 18 aa, synthetic construct
KTINGSTSPHLFAQNQQT

SEQ ID NO: 1660 - protein, 18 aa, synthetic construct
KTINGSGSPHSKAQNYRA

SEQ ID NO: 1661 - protein, 18 aa, synthetic construct
KTINGSGSPHSKARGQQT

SEQ ID NO: 1662 - protein, 18 aa, synthetic construct
KTINGSGSPHSKAQNRIR

SEQ ID NO: 1663 - protein, 18 aa, synthetic construct
KTINGSGSPHSKWTLQQT

SEQ ID NO: 1664 - protein, 18 aa, synthetic construct
KTINGSGSPHSKAQMKCT

SEQ ID NO: 1665 - protein, 18 aa, synthetic construct
KTINGSGSPHSLWQNQQT

SEQ ID NO: 1666 - protein, 18 aa, synthetic construct
KTINGSGSPHSKAQLSKT

SEQ ID NO: 1667 - protein, 18 aa, synthetic construct
KTINLIWSPHSKAQNQQT

SEQ ID NO: 1668 - protein, 18 aa, synthetic construct
KTINGSGSPHSKRVLQQT

SEQ ID NO: 1669 - protein, 18 aa, synthetic construct
KTINGSGSPHSKVRVQQT

SEQ ID NO: 1670 - protein, 18 aa, synthetic construct
KTINSRFSPHSKAQNQQT

SEQ ID NO: 1671 - protein, 18 aa, synthetic construct
KRSKGSGSPHSKAQNQQT

SEQ ID NO: 1672 - protein, 18 aa, synthetic construct
KTINGSGSPHRRLQNQQT

SEQ ID NO: 1673 - protein, 18 aa, synthetic construct
KTINGSGSPHSCAQNQQT

SEQ ID NO: 1674 - protein, 18 aa, synthetic construct
KTINGPLSPHRKAQNQQT

SEQ ID NO: 1675 - protein, 18 aa, synthetic construct
KTINGSVSPHLYAQNQQT

SEQ ID NO: 1676 - protein, 18 aa, synthetic construct
KTINGRISPHLKAQNQQT

SEQ ID NO: 1677 - protein, 18 aa, synthetic construct
KTINGSHSPHRKAQNQQT

SEQ ID NO: 1678 - protein, 18 aa, synthetic construct
KTINGSGSPHSKAQVSIT

SEQ ID NO: 1679 - protein, 18 aa, synthetic construct
KTINGSMSPHRRAQNQQT

SEQ ID NO: 1680 - protein, 18 aa, synthetic construct
KTINGRQSPHAKAQNQQT

SEQ ID NO: 1681 - protein, 18 aa, synthetic construct
KTINGSGSPHSKAVWRQT

SEQ ID NO: 1682 - protein, 18 aa, synthetic construct
KQPLGSGSPHSKAQNQQT

SEQ ID NO: 1683 - protein, 18 aa, synthetic construct
KTINGSGSPHSKAQNVKL

SEQ ID NO: 1684 - protein, 18 aa, synthetic construct
KTINGSGSPHSKRGTQQT

SEQ ID NO: 1685 - protein, 18 aa, synthetic construct
KTINGSVSPHYVAQNQQT

SEQ ID NO: 1686 - protein, 18 aa, synthetic construct
KTINGSGSPHSKNLRQQT

SEQ ID NO: 1687 - protein, 18 aa, synthetic construct
KTINGSGSPHSKAQAFRT

SEQ ID NO: 1688 - protein, 18 aa, synthetic construct
KTINGSGSPHSKCSNQQT

SEQ ID NO: 1689 - protein, 18 aa, synthetic construct
KELVGSGSPHSKAQNQQT

SEQ ID NO: 1690 - protein, 18 aa, synthetic construct
KTINGSGSPHSLVFNQQT

SEQ ID NO: 1691 - protein, 18 aa, synthetic construct
KTINGSGSPHSKAQATRT

SEQ ID NO: 1692 - protein, 18 aa, synthetic construct
KTINGTSSPHCKAQNQQT

SEQ ID NO: 1693 - protein, 18 aa, synthetic construct
KTINGSGSPHSKALWRQT

SEQ ID NO: 1694 - protein, 18 aa, synthetic construct
KTINGSGSPHSKAQFSVT

SEQ ID NO: 1695 - protein, 18 aa, synthetic construct
KTINGSGSPHSKLYMQQT

SEQ ID NO: 1696 - protein, 18 aa, synthetic construct
KTINGSLSPHYMAQNQQT

SEQ ID NO: 1697 - protein, 18 aa, synthetic construct
KTINGSGSPHSKAWLMQT

SEQ ID NO: 1698 - protein, 18 aa, synthetic construct
KTINGSGSPHSKSLKQQT

SEQ ID NO: 1699 - protein, 18 aa, synthetic construct
KTINGSGSPHSKAQNTRR

SEQ ID NO: 1700 - protein, 18 aa, synthetic construct
KTINGSGSPHYLLQNQQT

SEQ ID NO: 1701 - protein, 18 aa, synthetic construct
KTINGSGSPHTWSQNQQT

SEQ ID NO: 1702 - protein, 18 aa, synthetic construct
KTINGSGSPHSKTRMQQT

SEQ ID NO: 1703 - protein, 18 aa, synthetic construct
KTINTRPSPHSKAQNQQT

SEQ ID NO: 1704 - protein, 18 aa, synthetic construct
KTINGSGSPHSKAQILVT

SEQ ID NO: 1705 - protein, 18 aa, synthetic construct
KTINGSGSPHSKAQNAKS

SEQ ID NO: 1706 - protein, 18 aa, synthetic construct
KTINGSGSPHSRTYNQQT

SEQ ID NO: 1707 - protein, 18 aa, synthetic construct
KTINGSGSPHSKKGGQQT

SEQ ID NO: 1708 - protein, 18 aa, synthetic construct
KTINGYSSPHRKAQNQQT

SEQ ID NO: 1709 - protein, 18 aa, synthetic construct
KTINGSGSPHWVSQNQQT

SEQ ID NO: 1710 - protein, 18 aa, synthetic construct
KTINGSGSPHSKARLAQT

SEQ ID NO: 1711 - protein, 18 aa, synthetic construct
KTINGMCSPHSKAQNQQT

SEQ ID NO: 1712 - protein, 18 aa, synthetic construct
KTINGSGSPHSKSNKQQT

SEQ ID NO: 1713 - protein, 18 aa, synthetic construct
KTINGSGSPHSKAQFVLT

SEQ ID NO: 1714 - protein, 18 aa, synthetic construct
KTINGSISPHFVAQNQQT

SEQ ID NO: 1715 - protein, 18 aa, synthetic construct
KTINGSGSPHRRMQNQQT

SEQ ID NO: 1716 - protein, 18 aa, synthetic construct
KTINGSGSPHSKAWILQT

SEQ ID NO: 1717 - protein, 18 aa, synthetic construct
KTINGSGSPHSKAQGVKT

SEQ ID NO: 1718 - protein, 18 aa, synthetic construct
KTINGSGSPHSKAQFSLT

SEQ ID NO: 1719 - protein, 18 aa, synthetic construct
KTINMLRSPHSKAQNQQT

SEQ ID NO: 1720 - protein, 18 aa, synthetic construct
KTINGSGSPHSKAQLGKT

SEQ ID NO: 1721 - protein, 18 aa, synthetic construct
KTINGSGSPHSMYLNQQT

SEQ ID NO: 1722 - protein, 18 aa, synthetic construct
KTINGHDSPHVTDQNQQT

SEQ ID NO: 1723 - protein, 18 aa, synthetic construct
KTINGHDSPHKRGQHRQT

SEQ ID NO: 1724 - protein, 18 aa, synthetic construct
KMPEGHDSPHKSGQNQQT

SEQ ID NO: 1725 - protein, 18 aa, synthetic construct
KMEGGHDSPHKSGQNQQT

SEQ ID NO: 1726 - protein, 18 aa, synthetic construct
KMEYGHDSPHKSGQNQQT

SEQ ID NO: 1727 - protein, 18 aa, synthetic construct
KAEWGHDSPHKSGQNQQT

SEQ ID NO: 1728 - protein, 18 aa, synthetic construct
KCEWGHDSPHKSGQNQQT

SEQ ID NO: 1729 - protein, 18 aa, synthetic construct
KANNGQDSPHKSGQNQQT

SEQ ID NO: 1730 - protein, 18 aa, synthetic construct
KTINGHDSPHLCGQNQQT

SEQ ID NO: 1731 - protein, 18 aa, synthetic construct
KIPEGHDSPHKSGQNQQT

SEQ ID NO: 1732 - protein, 18 aa, synthetic construct
KADMGHDSPHKSGQNQQT

SEQ ID NO: 1733 - protein, 18 aa, synthetic construct
KTINGHLSPHYFGQNQQT

SEQ ID NO: 1734 - protein, 18 aa, synthetic construct
KIEYGHDSPHKSGQNQQT

SEQ ID NO: 1735 - protein, 18 aa, synthetic construct
KADYGHDSPHKSGQNQQT

SEQ ID NO: 1736 - protein, 18 aa, synthetic construct
KIETGHDSPHKSGQNQQT

SEQ ID NO: 1737 - protein, 18 aa, synthetic construct
KTINGHDSPHTNGQKQQT

SEQ ID NO: 1738 - protein, 18 aa, synthetic construct
KMEWGHDSPHKSGQNQQT

SEQ ID NO: 1739 - protein, 18 aa, synthetic construct
KTINGHDSPHWLLQNQQT

SEQ ID NO: 1740 - protein, 18 aa, synthetic construct
KCEYGHDSPHKSGQNQQT

SEQ ID NO: 1741 - protein, 18 aa, synthetic construct
KRINGHDSPHKSGQKQQN

SEQ ID NO: 1742 - protein, 18 aa, synthetic construct
KMEIGHDSPHKSGQNQQT

SEQ ID NO: 1743 - protein, 18 aa, synthetic construct
KLEYGHDSPHKSGQNQQT

SEQ ID NO: 1744 - protein, 18 aa, synthetic construct
KADWGHDSPHKSGQNQQT

SEQ ID NO: 1745 - protein, 18 aa, synthetic construct
KIEIGHDSPHKSGQNQQT

SEQ ID NO: 1746 - protein, 18 aa, synthetic construct
KTIKDNDSPHKSGQNQQT

SEQ ID NO: 1747 - protein, 18 aa, synthetic construct
KDIMGHDSPHKSGQNQQT

SEQ ID NO: 1748 - protein, 18 aa, synthetic construct
KFEQGHDSPHKSGQNQQT

SEQ ID NO: 1749 - protein, 18 aa, synthetic construct
KMEFGHDSPHKSGQNQQT

SEQ ID NO: 1750 - protein, 18 aa, synthetic construct
KCDQGHDSPHKSGQNQQT

SEQ ID NO: 1751 - protein, 18 aa, synthetic construct
KLPEGHDSPHKSGQNQQT

SEQ ID NO: 1752 - protein, 18 aa, synthetic construct
KIENGHDSPHKSGQNQQT

SEQ ID NO: 1753 - protein, 18 aa, synthetic construct
KMESGHDSPHKSGQNQQT

SEQ ID NO: 1754 - protein, 18 aa, synthetic construct
KAEIGHDSPHKSGQNQQT

SEQ ID NO: 1755 - protein, 18 aa, synthetic construct
KVEYGHDSPHKSGQNQQT

SEQ ID NO: 1756 - protein, 18 aa, synthetic construct
KIINGHDSPHKSGLTQQT

SEQ ID NO: 1757 - protein, 18 aa, synthetic construct
KTSNGDDSPHKSGRNQQT

SEQ ID NO: 1758 - protein, 18 aa, synthetic construct
KIEVGHDSPHKSGQNQQT

SEQ ID NO: 1759 - DNA, 3413 bp, synthetic construct
  source 1..3413: mol_type = other DNA
ctgcgcgctcgctcgctcactgaggccgcccgggcaaagcccgggcgtcgggcgacctttggtcgcccggcctcagtgagcgagcgagcgcgcagagagggagtggccaactccatcactaggggttccttgtagttaatgattaacccgccatgctacttatctaccagggtaatggggatcctctagaactatagctagtcgacattgattattgactagttattaatagtaatcaattacggggtcattagttcatagcccatatatggagttccgcgttacataacttacggtaaatggcccgcctggctgaccgcccaacgacccccgcccattgacgtcaataatgacgtatgttcccatagtaacgccaatagggactttccattgacgtcaatgggtggagtatttacggtaaactgcccacttggcagtacatcaagtgtatcatatgccaagtacgccccctattgacgtcaatgacggtaaatggcccgcctggcattatgcccagtacatgaccttatgggactttcctacttggcagtacatctacgtattagtcatcgctattaccatgtcgaggccacgttctgcttcactctccccatctcccccccctccccacccccaattttgtatttatttattttttaattattttgtgcagcgatgggggcggggggggggggcgcgcgccaggcggggcggggcggggcgaggggcggggcggggcgaggcggagaggtgcggcggcagccaatcagagcggcgcgctccgaaagtttccttttatggcgaggcggcggcggcggcggccctataaaaagcgaagcgcgcggcgggcgggagcaagcttcgtttagtgaaccgtcagatcgcctggagacgccatccacgctgttttgacctccatagaagacaccgggaccgatccagcctccgcggattcgaatcccggccgggaacggtgcattggaacgcggattccccgtgccaagagtgacgtaagtaccgcctatagagtctataggcccacaaaaaatgctttcttcttttaatatacttttttgtttatcttatttctaatactttccctaatctctttctttcagggcaataatgatacaatgtatcatgcctctttgcaccattctaaagaataacagtgataatttctgggttaaggcaatagcaatatttctgcatataaatatttctgcatataaattgtaactgatgtaagaggtttcatattgctaatagcagctacaatccagctaccattctgcttttattttatggttgggataaggctggattattctgagtccaagctaggcccttttgctaatcatgttcatacctcttatcttcctcccacagctcctgggcaacgtgctggtctgtgtgctggcccatcactttggcaaagaattgggattcgaaccggtgccgccaccatggaattcagcagccccagcagagaggaatgccccaagcctctgagccgggtgtcaatcatggccggatctctgacaggactgctgctgcttcaggccgtgtcttgggcttctggcgctagaccttgcatccccaagagcttcggctacagcagcgtcgtgtgcgtgtgcaatgccacctactgcgacagcttcgaccctcctacctttcctgctctgggcaccttcagcagatacgagagcaccagatccggcagacggatggaactgagcatgggacccatccaggccaatcacacaggcactggcctgctgctgacactgcagcctgagcagaaattccagaaagtgaaaggcttcggcggagccatgacagatgccgccgctctgaatatcctggctctgtctccaccagctcagaacctgctgctcaagagctacttcagcgaggaaggcatcggctacaacatcatcagagtgcccatggccagctgcgacttcagcatcaggacctacacctacgccgacacacccgacgatttccagctgcacaacttcagcctgcctgaagaggacaccaagctgaagatccctctgatccacagagccctgcagctggcacaaagacccgtgtcactgctggcctctccatggacatctcccacctggctgaaaacaaatggcgccgtgaatggcaagggcagcctgaaaggccaacctggcgacatctaccaccagacctgggccagatacttcgtgaagttcctggacgcctatgccgagcacaagctgcagttttgggccgtgacagccgagaacgaaccttctgctggactgctgagcggctacccctttcagtgcctgggctttacacccgagcaccagcgggactttatcgcccgtgatctgggacccacactggccaatagcacccaccataatgtgcggctgctgatgctggacgaccagagactgcttctgccccactgggctaaagtggtgctgacagatcctgaggccgccaaatacgtgcacggaatcgccgtgcactggtatctggactttctggcccctgccaaggccacactgggagagacacacagactgttccccaacaccatgctgttcgccagcgaagcctgtgtgggcagcaagttttgggaacagagcgtgcggctcggcagctgggatagaggcatgcagtacagccacagcatcatcaccaacctgctgtaccacgtcgtcggctggaccgactggaatctggccctgaatcctgaaggcggccctaactgggtccgaaacttcgtggacagccccatcatcgtggacatcaccaaggacaccttctacaagcagcccatgttctaccacctgggacacttcagcaagttcatccccgagggctctcagcgcgttggactggtggcttcccagaagaacgatctggacgccgtggctctgatgcaccctgatggatctgctgtggtggtggtcctgaaccgcagcagcaaagatgtgcccctgaccatcaaggatcccgccgtgggattcctggaaacaatcagccctggctactccatccacacctacctgtggcgtagacagtagtaactcgaggacggggtgaactacgcctgaggatccgatctttttccctctgccaaaaattatggggacatcatgaagccccttgagcatctgacttctggctaataaaggaaatttattttcattgcaatagtgtgttggaattttttgtgtctctcactcggcctaggtagataagtagcatggcgggttaatcattaactacaaggaacccctagtgatggagttggccactccctctctgcgcgctcgctcgctcactgaggccgggcgaccaaaggtcgcccgacgcccgggctttgcccgggcggcctcagtgagcgagcgagcgcgcag

SEQ ID NO: 1760 - DNA, 3428 bp, synthetic construct
  source 1..3428: mol_type = other DNA
ctgcgcgctcgctcgctcactgaggccgcccgggcaaagcccgggcgtcgggcgacctttggtcgcccggcctcagtgagcgagcgagcgcgcagagagggagtggccaactccatcactaggggttccttgtagttaatgattaacccgccatgctacttatctaccagggtaatggggatcctctagaactatagctagtcgacattgattattgactagttattaatagtaatcaattacggggtcattagttcatagcccatatatggagttccgcgttacataacttacggtaaatggcccgcctggctgaccgcccaacgacccccgcccattgacgtcaataatgacgtatgttcccatagtaacgccaatagggactttccattgacgtcaatgggtggagtatttacggtaaactgcccacttggcagtacatcaagtgtatcatatgccaagtacgccccctattgacgtcaatgacggtaaatggcccgcctggcattatgcccagtacatgaccttatgggactttcctacttggcagtacatctacgtattagtcatcgctattaccatgtcgaggccacgttctgcttcactctccccatctcccccccctccccacccccaattttgtatttatttattttttaattattttgtgcagcgatgggggcggggggggggggcgcgcgccaggcggggcggggcggggcgaggggcggggcggggcgaggcggagaggtgcggcggcagccaatcagagcggcgcgctccgaaagtttccttttatggcgaggcggcggcggcggcggccctataaaaagcgaagcgcgcggcgggcgggagcaagcttcgtttagtgaaccgtcagatcgcctggagacgccatccacgctgttttgacctccatagaagacaccgggaccgatccagcctccgcggattcgaatcccggccgggaacggtgcattggaacgcggattccccgtgccaagagtgacgtaagtaccgcctatagagtctataggcccacaaaaaatgctttcttcttttaatatacttttttgtttatcttatttctaatactttccctaatctctttctttcagggcaataatgatacaatgtatcatgcctctttgcaccattctaaagaataacagtgataatttctgggttaaggcaatagcaatatttctgcatataaatatttctgcatataaattgtaactgatgtaagaggtttcatattgctaatagcagctacaatccagctaccattctgcttttattttatggttgggataaggctggattattctgagtccaagctaggcccttttgctaatcatgttcatacctcttatcttcctcccacagctcctgggcaacgtgctggtctgtgtgctggcccatcactttggcaaagaattgggattcgaaccggtgccgccaccatggaattcagcagccccagcagagaggaatgccccaagcctctgagccgggtgtcaatcatggccggatctctgacaggactgctgctgcttcaggccgtgtcttgggcttctggcgctagaccttgcatccccaagagcttcggctacagcagcgtcgtgtgcgtgtgcaatgccacctactgcgacagcttcgaccctcctacctttcctgctctgggcaccttcagcagatacgagagcaccagatccggcagacggatggaactgagcatgggacccatccaggccaatcacacaggcactggcctgctgctgacactgcagcctgagcagaaattccagaaagtgaaaggcttcggcggagccatgacagatgccgccgctctgaatatcctggctctgtctccaccagctcagaacctgctgctcaagagctacttcagcgaggaaggcatcggctacaacatcatcagagtgcccatggccagctgcgacttcagcatcaggacctacacctacgccgacacacccgacgatttccagctgcacaacttcagcctgcctgaagaggacaccaagctgaagatccctctgatccacagagccctgcagctggcacaaagacccgtgtcactgctggcctctccatggacatctcccacctggctgaaaacaaatggcgccgtgaatggcaagggcagcctgaaaggccaacctggcgacatctaccaccagacctgggccagatacttcgtgaagttcctggacgcctatgccgagcacaagctgcagttttgggccgtgacagccgagaacgaaccttctgctggactgctgagcggctacccctttcagtgcctgggctttacacccgagcaccagcgggactttatcgcccgtgatctgggacccacactggccaatagcacccaccataatgtgcggctgctgatgctggacgaccagagactgcttctgccccactgggctaaagtggtgctgacagatcctgaggccgccaaatacgtgcacggaatcgccgtgcactggtatctggactttctggcccctgccaaggccacactgggagagacacacagactgttccccaacaccatgctgttcgccagcgaagcctgtgtgggcagcaagttttgggaacagagcgtgcggctcggcagctgggatagaggcatgcagtacagccacagcatcatcaccaacctgctgtaccacgtcgtcggctggaccgactggaatctggccctgaatcctgaaggcggccctaactgggtccgaaacttcgtggacagccccatcatcgtggacatcaccaaggacaccttctacaagcagcccatgttctaccacctgggacacttcagcaagttcatccccgagggctctcagcgcgttggactggtggcttcccagaagaacgatctggacgccgtggctctgatgcaccctgatggatctgctgtggtggtggtcctgaaccgcagcagcaaagatgtgcccctgaccatcaaggatcccgccgtgggattcctggaaacaatcagccctggctactccatccacacctacctgtggcgtagacagaagtttgaaagacagtagtaactcgaggacggggtgaactacgcctgaggatccgatctttttccctctgccaaaaattatggggacatcatgaagccccttgagcatctgacttctggctaataaaggaaatttattttcattgcaatagtgtgttggaattttttgtgtctctcactcggcctaggtagataagtagcatggcgggttaatcattaactacaaggaacccctagtgatggagttggccactccctctctgcgcgctcgctcgctcactgaggccgggcgaccaaaggtcgcccgacgcccgggctttgcccgggcggcctcagtgagcgagcgagcgcgcag

SEQ ID NO: 1761 - DNA, 3476 bp, synthetic construct
  source 1..3476: mol_type = other DNA
ctgcgcgctcgctcgctcactgaggccgcccgggcaaagcccgggcgtcgggcgacctttggtcgcccggcctcagtgagcgagcgagcgcgcagagagggagtggccaactccatcactaggggttccttgtagttaatgattaacccgccatgctacttatctaccagggtaatggggatcctctagaactatagctagtcgacattgattattgactagttattaatagtaatcaattacggggtcattagttcatagcccatatatggagttccgcgttacataacttacggtaaatggcccgcctggctgaccgcccaacgacccccgcccattgacgtcaataatgacgtatgttcccatagtaacgccaatagggactttccattgacgtcaatgggtggagtatttacggtaaactgcccacttggcagtacatcaagtgtatcatatgccaagtacgccccctattgacgtcaatgacggtaaatggcccgcctggcattatgcccagtacatgaccttatgggactttcctacttggcagtacatctacgtattagtcatcgctattaccatgtcgaggccacgttctgcttcactctccccatctcccccccctccccacccccaattttgtatttatttattttttaattattttgtgcagcgatgggggcggggggggggggcgcgcgccaggcggggcggggcggggcgaggggcggggcggggcgaggcggagaggtgcggcggcagccaatcagagcggcgcgctccgaaagtttccttttatggcgaggcggcggcggcggcggccctataaaaagcgaagcgcgcggcgggcgggagcaagcttcgtttagtgaaccgtcagatcgcctggagacgccatccacgctgttttgacctccatagaagacaccgggaccgatccagcctccgcggattcgaatcccggccgggaacggtgcattggaacgcggattccccgtgccaagagtgacgtaagtaccgcctatagagtctataggcccacaaaaaatgctttcttcttttaatatacttttttgtttatcttatttctaatactttccctaatctctttctttcagggcaataatgatacaatgtatcatgcctctttgcaccattctaaagaataacagtgataatttctgggttaaggcaatagcaatatttctgcatataaatatttctgcatataaattgtaactgatgtaagaggtttcatattgctaatagcagctacaatccagctaccattctgcttttattttatggttgggataaggctggattattctgagtccaagctaggcccttttgctaatcatgttcatacctcttatcttcctcccacagctcctgggcaacgtgctggtctgtgtgctggcccatcactttggcaaagaattgggattcgaaccggtgccgccaccatggaattcagcagccccagcagagaggaatgccccaagcctctgagccgggtgtcaatcatggccggatctctgacaggactgctgctgcttcaggccgtgtcttgggcttctggcatgaaggagaccgctgctgcaaagttcgagagacagcatatggatagctccacaagcgccgcagctagaccttgcatccccaagagcttcggctacagcagcgtcgtgtgcgtgtgcaatgccacctactgcgacagcttcgaccctcctacctttcctgctctgggcaccttcagcagatacgagagcaccagatccggcagacggatggaactgagcatgggacccatccaggccaatcacacaggcactggcctgctgctgacactgcagcctgagcagaaattccagaaagtgaaaggcttcggcggagccatgacagatgccgccgctctgaatatcctggctctgtctccaccagctcagaacctgctgctcaagagctacttcagcgaggaaggcatcggctacaacatcatcagagtgcccatggccagctgcgacttcagcatcaggacctacacctacgccgacacacccgacgatttccagctgcacaacttcagcctgcctgaagaggacaccaagctgaagatccctctgatccacagagccctgcagctggcacaaagacccgtgtcactgctggcctctccatggacatctcccacctggctgaaaacaaatggcgccgtgaatggcaagggcagcctgaaaggccaacctggcgacatctaccaccagacctgggccagatacttcgtgaagttcctggacgcctatgccgagcacaagctgcagttttgggccgtgacagccgagaacgaaccttctgctggactgctgagcggctacccctttcagtgcctgggctttacacccgagcaccagcgggactttatcgcccgtgatctgggacccacactggccaatagcacccaccataatgtgcggctgctgatgctggacgaccagagactgcttctgccccactgggctaaagtggtgctgacagatcctgaggccgccaaatacgtgcacggaatcgccgtgcactggtatctggactttctggcccctgccaaggccacactgggagagacacacagactgttccccaacaccatgctgttcgccagcgaagcctgtgtgggcagcaagttttgggaacagagcgtgcggctcggcagctgggatagaggcatgcagtacagccacagcatcatcaccaacctgctgtaccacgtcgtcggctggaccgactggaatctggccctgaatcctgaaggcggccctaactgggtccgaaacttcgtggacagccccatcatcgtggacatcaccaaggacaccttctacaagcagcccatgttctaccacctgggacacttcagcaagttcatccccgagggctctcagcgcgttggactggtggcttcccagaagaacgatctggacgccgtggctctgatgcaccctgatggatctgctgtggtggtggtcctgaaccgcagcagcaaagatgtgcccctgaccatcaaggatcccgccgtgggattcctggaaacaatcagccctggctactccatccacacctacctgtggcgtagacagtagtaactcgaggacggggtgaactacgcctgaggatccgatctttttccctctgccaaaaattatggggacatcatgaagccccttgagcatctgacttctggctaataaaggaaatttattttcattgcaatagtgtgttggaattttttgtgtctctcactcggcctaggtagataagtagcatggcgggttaatcattaactacaaggaacccctagtgatggagttggccactccctctctgcgcgctcgctcgctcactgaggccgggcgaccaaaggtcgcccgacgcccgggctttgcccgggcggcctcagtgagcgagcgagcgcgcag

SEQ ID NO: 1762 - DNA, 3428 bp, synthetic construct
  source 1..3428: mol_type = other DNA
ctgcgcgctcgctcgctcactgaggccgcccgggcaaagcccgggcgtcgggcgacctttggtcgcccggcctcagtgagcgagcgagcgcgcagagagggagtggccaactccatcactaggggttccttgtagttaatgattaacccgccatgctacttatctaccagggtaatggggatcctctagaactatagctagtcgacattgattattgactagttattaatagtaatcaattacggggtcattagttcatagcccatatatggagttccgcgttacataacttacggtaaatggcccgcctggctgaccgcccaacgacccccgcccattgacgtcaataatgacgtatgttcccatagtaacgccaatagggactttccattgacgtcaatgggtggagtatttacggtaaactgcccacttggcagtacatcaagtgtatcatatgccaagtacgccccctattgacgtcaatgacggtaaatggcccgcctggcattatgcccagtacatgaccttatgggactttcctacttggcagtacatctacgtattagtcatcgctattaccatgtcgaggccacgttctgcttcactctccccatctcccccccctccccacccccaattttgtatttatttattttttaattattttgtgcagcgatgggggcggggggggggggcgcgcgccaggcggggcggggcggggcgaggggcggggcggggcgaggcggagaggtgcggcggcagccaatcagagcggcgcgctccgaaagtttccttttatggcgaggcggcggcggcggcggccctataaaaagcgaagcgcgcggcgggcgggagcaagcttcgtttagtgaaccgtcagatcgcctggagacgccatccacgctgttttgacctccatagaagacaccgggaccgatccagcctccgcggattcgaatcccggccgggaacggtgcattggaacgcggattccccgtgccaagagtgacgtaagtaccgcctatagagtctataggcccacaaaaaatgctttcttcttttaatatacttttttgtttatcttatttctaatactttccctaatctctttctttcagggcaataatgatacaatgtatcatgcctctttgcaccattctaaagaataacagtgataatttctgggttaaggcaatagcaatatttctgcatataaatatttctgcatataaattgtaactgatgtaagaggtttcatattgctaatagcagctacaatccagctaccattctgcttttattttatggttgggataaggctggattattctgagtccaagctaggcccttttgctaatcatgttcatacctcttatcttcctcccacagctcctgggcaacgtgctggtctgtgtgctggcccatcactttggcaaagaattgggattcgaaccggtgccgccaccatggaattcagcagccccagcagagaggaatgccccaagcctctgagccgggtgtcaatcatggccggatctctgacaggactgctgctgcttcaggccgtgtcttgggcttctggcgctagaccttgcatccccaagagcttcggctacagcagcgtcgtgtgcgtgtgcaatgccacctactgcgacagcttcgaccctcctacctttcctgctctgggcaccttcagcagatacgagagcaccagatccggcagacggatggaactgagcatgggacccatccaggccaatcacacaggcactggcctgctgctgacactgcagcctgagcagaaattccagaaagtgaaaggcttcggcggagccatgacagatgccgccgctctgaatatcctggctctgtctccaccagctcagaacctgctgctcaagagctacttcagcgaggaaggcatcggctacaacatcatcagagtgcccatggccagctgcgacttcagcatcaggacctacacctacgccgacacacccgacgatttccagctgcacaacttcagcctgcctgaagaggacaccaagctgaagatccctctgatccacagagccctgcagctggcacaaagacccgtgtcactgctggcctctccatggacatctcccacctggctgaaaacaaatggcgccgtgaatggcaagggcagcctgaaaggccaacctggcgacatctaccaccagacctgggccagatacttcgtgaagttcctggacgcctatgccgagcacaagctgcagttttgggccgtgacagccgagaacgaaccttctgctggactgctgagcggctacccctttcagtgcctgggctttacacccgagcaccagcgggactttatcgcccgtgatctgggacccacactggccaatagcacccaccataatgtgcggctgctgatgctggacgaccagagactgcttctgccccactgggctaaagtggtgctgacagatcctgaggccgccaaatacgtgcacggaatcgccgtgcactggtatctggactttctggcccctgccaaggccacactgggagagacacacagactgttccccaacaccatgctgttcgccagcgaagcctgtgtgggcagcaagttttgggaacagagcgtgcggctcggcagctgggatagaggcatgcagtacagccacagcatcatcaccaacctgctgtaccacgtcgtcggctggaccgactggaatctggccctgaatcctgaaggcggccctaactgggtccgaaacttcgtggacagccccatcatcgtggacatcaccaaggacaccttctacaagcagcccatgttctaccacctgggacacttcagcaagttcatccccgagggctctcagcgcgttggactggtggcttcccagaagaacgatctggacgccgtggctctgatgcaccctgatggatctgctgtggtggtggtcctgaaccgcagcagcaaagatgtgcccctgaccatcaaggatcccgccgtgggattcctggaaacaatcagccctggctactccatccacacctacctgtggcgtagacagcagaaaatcctggattagtaactcgaggacggggtgaactacgcctgaggatccgatctttttccctctgccaaaaattatggggacatcatgaagccccttgagcatctgacttctggctaataaaggaaatttattttcattgcaatagtgtgttggaattttttgtgtctctcactcggcctaggtagataagtagcatggcgggttaatcattaactacaaggaacccctagtgatggagttggccactccctctctgcgcgctcgctcgctcactgaggccgggcgaccaaaggtcgcccgacgcccgggctttgcccgggcggcctcagtgagcgagcgagcgcgcag

SEQ ID NO: 1763 - DNA, 3428 bp, synthetic construct
  source 1..3428: mol_type = other DNA
ctgcgcgctcgctcgctcactgaggccgcccgggcaaagcccgggcgtcgggcgacctttggtcgcccggcctcagtgagcgagcgagcgcgcagagagggagtggccaactccatcactaggggttccttgtagttaatgattaacccgccatgctacttatctaccagggtaatggggatcctctagaactatagctagtcgacattgattattgactagttattaatagtaatcaattacggggtcattagttcatagcccatatatggagttccgcgttacataacttacggtaaatggcccgcctggctgaccgcccaacgacccccgcccattgacgtcaataatgacgtatgttcccatagtaacgccaatagggactttccattgacgtcaatgggtggagtatttacggtaaactgcccacttggcagtacatcaagtgtatcatatgccaagtacgccccctattgacgtcaatgacggtaaatggcccgcctggcattatgcccagtacatgaccttatgggactttcctacttggcagtacatctacgtattagtcatcgctattaccatgtcgaggccacgttctgcttcactctccccatctcccccccctccccacccccaattttgtatttatttattttttaattattttgtgcagcgatgggggcggggggggggggcgcgcgccaggcggggcggggcggggcgaggggcggggcggggcgaggcggagaggtgcggcggcagccaatcagagcggcgcgctccgaaagtttccttttatggcgaggcggcggcggcggcggccctataaaaagcgaagcgcgcggcgggcgggagcaagcttcgtttagtgaaccgtcagatcgcctggagacgccatccacgctgttttgacctccatagaagacaccgggaccgatccagcctccgcggattcgaatcccggccgggaacggtgcattggaacgcggattccccgtgccaagagtgacgtaagtaccgcctatagagtctataggcccacaaaaaatgctttcttcttttaatatacttttttgtttatcttatttctaatactttccctaatctctttctttcagggcaataatgatacaatgtatcatgcctctttgcaccattctaaagaataacagtgataatttctgggttaaggcaatagcaatatttctgcatataaatatttctgcatataaattgtaactgatgtaagaggtttcatattgctaatagcagctacaatccagctaccattctgcttttattttatggttgggataaggctggattattctgagtccaagctaggcccttttgctaatcatgttcatacctcttatcttcctcccacagctcctgggcaacgtgctggtctgtgtgctggcccatcactttggcaaagaattgggattcgaaccggtgccgccaccatggaattcagcagccccagcagagaggaatgccccaagcctctgagccgggtgtcaatcatggccggatctctgacaggactgctgctgcttcaggccgtgtcttgggcttctggcgctagaccttgcatccccaagagcttcggctacagcagcgtcgtgtgcgtgtgcaatgccacctactgcgacagcttcgaccctcctacctttcctgctctgggcaccttcagcagatacgagagcaccagatccggcagacggatggaactgagcatgggacccatccaggccaatcacacaggcactggcctgctgctgacactgcagcctgagcagaaattccagaaagtgaaaggcttcggcggagccatgacagatgccgccgctctgaatatcctggctctgtctccaccagctcagaacctgctgctcaagagctacttcagcgaggaaggcatcggctacaacatcatcagagtgcccatggccagctgcgacttcagcatcaggacctacacctacgccgacacacccgacgatttccagctgcacaacttcagcctgcctgaagaggacaccaagctgaagatccctctgatccacagagccctgcagctggcacaaagacccgtgtcactgctggcctctccatggacatctcccacctggctgaaaacaaatggcgccgtgaatggcaagggcagcctgaaaggccaacctggcgacatctaccaccagacctgggccagatacttcgtgaagttcctggacgcctatgccgagcacaagctgcagttttgggccgtgacagccgagaacgaaccttctgctggactgctgagcggctacccctttcagtgcctgggctttacacccgagcaccagcgggactttatcgcccgtgatctgggacccacactggccaatagcacccaccataatgtgcggctgctgatgctggacgaccagagactgcttctgccccactgggctaaagtggtgctgacagatcctgaggccgccaaatacgtgcacggaatcgccgtgcactggtatctggactttctggcccctgccaaggccacactgggagagacacacagactgttccccaacaccatgctgttcgccagcgaagcctgtgtgggcagcaagttttgggaacagagcgtgcggctcggcagctgggatagaggcatgcagtacagccacagcatcatcaccaacctgctgtaccacgtcgtcggctggaccgactggaatctggccctgaatcctgaaggcggccctaactgggtccgaaacttcgtggacagccccatcatcgtggacatcaccaaggacaccttctacaagcagcccatgttctaccacctgggacacttcagcaagttcatccccgagggctctcagcgcgttggactggtggcttcccagaagaacgatctggacgccgtggctctgatgcaccctgatggatctgctgtggtggtggtcctgaaccgcagcagcaaagatgtgcccctgaccatcaaggatcccgccgtgggattcctggaaacaatcagccctggctactccatccacacctacctgtggcgtagacagcagagattcttcgagtagtaactcgaggacggggtgaactacgcctgaggatccgatctttttccctctgccaaaaattatggggacatcatgaagccccttgagcatctgacttctggctaataaaggaaatttattttcattgcaatagtgtgttggaattttttgtgtctctcactcggcctaggtagataagtagcatggcgggttaatcattaactacaaggaacccctagtgatggagttggccactccctctctgcgcgctcgctcgctcactgaggccgggcgaccaaaggtcgcccgacgcccgggctttgcccgggcggcctcagtgagcgagcgagcgcgcag

SEQ ID NO: 1764 - DNA, 3512 bp, synthetic construct
  source 1..3512: mol_type = other DNA
ctgcgcgctcgctcgctcactgaggccgcccgggcaaagcccgggcgtcgggcgacctttggtcgcccggcctcagtgagcgagcgagcgcgcagagagggagtggccaactccatcactaggggttccttgtagttaatgattaacccgccatgctacttatctaccagggtaatggggatcctctagaactatagctagtcgacattgattattgactagttattaatagtaatcaattacggggtcattagttcatagcccatatatggagttccgcgttacataacttacggtaaatggcccgcctggctgaccgcccaacgacccccgcccattgacgtcaataatgacgtatgttcccatagtaacgccaatagggactttccattgacgtcaatgggtggagtatttacggtaaactgcccacttggcagtacatcaagtgtatcatatgccaagtacgccccctattgacgtcaatgacggtaaatggcccgcctggcattatgcccagtacatgaccttatgggactttcctacttggcagtacatctacgtattagtcatcgctattaccatgtcgaggccacgttctgcttcactctccccatctcccccccctccccacccccaattttgtatttatttattttttaattattttgtgcagcgatgggggcggggggggggggcgcgcgccaggcggggcggggcggggcgaggggcggggcggggcgaggcggagaggtgcggcggcagccaatcagagcggcgcgctccgaaagtttccttttatggcgaggcggcggcggcggcggccctataaaaagcgaagcgcgcggcgggcgggagcaagcttcgtttagtgaaccgtcagatcgcctggagacgccatccacgctgttttgacctccatagaagacaccgggaccgatccagcctccgcggattcgaatcccggccgggaacggtgcattggaacgcggattccccgtgccaagagtgacgtaagtaccgcctatagagtctataggcccacaaaaaatgctttcttcttttaatatacttttttgtttatcttatttctaatactttccctaatctctttctttcagggcaataatgatacaatgtatcatgcctctttgcaccattctaaagaataacagtgataatttctgggttaaggcaatagcaatatttctgcatataaatatttctgcatataaattgtaactgatgtaagaggtttcatattgctaatagcagctacaatccagctaccattctgcttttattttatggttgggataaggctggattattctgagtccaagctaggcccttttgctaatcatgttcatacctcttatcttcctcccacagctcctgggcaacgtgctggtctgtgtgctggcccatcactttggcaaagaattgggattcgaaccggtgccgccaccatggaattcagcagccccagcagagaggaatgccccaagcctctgagccgggtgtcaatcatggccggatctctgacaggactgctgctgcttcaggccgtgtcttgggcttctggcgctagaccttgcatccccaagagcttcggctacagcagcgtcgtgtgcgtgtgcaatgccacctactgcgacagcttcgaccctcctacctttcctgctctgggcaccttcagcagatacgagagcaccagatccggcagacggatggaactgagcatgggacccatccaggccaatcacacaggcactggcctgctgctgacactgcagcctgagcagaaattccagaaagtgaaaggcttcggcggagccatgacagatgccgccgctctgaatatcctggctctgtctccaccagctcagaacctgctgctcaagagctacttcagcgaggaaggcatcggctacaacatcatcagagtgcccatggccagctgcgacttcagcatcaggacctacacctacgccgacacacccgacgatttccagctgcacaacttcagcctgcctgaagaggacaccaagctgaagatccctctgatccacagagccctgcagctggcacaaagacccgtgtcactgctggcctctccatggacatctcccacctggctgaaaacaaatggcgccgtgaatggcaagggcagcctgaaaggccaacctggcgacatctaccaccagacctgggccagatacttcgtgaagttcctggacgcctatgccgagcacaagctgcagttttgggccgtgacagccgagaacgaaccttctgctggactgctgagcggctacccctttcagtgcctgggctttacacccgagcaccagcgggactttatcgcccgtgatctgggacccacactggccaatagcacccaccataatgtgcggctgctgatgctggacgaccagagactgcttctgccccactgggctaaagtggtgctgacagatcctgaggccgccaaatacgtgcacggaatcgccgtgcactggtatctggactttctggcccctgccaaggccacactgggagagacacacagactgttccccaacaccatgctgttcgccagcgaagcctgtgtgggcagcaagttttgggaacagagcgtgcggctcggcagctgggatagaggcatgcagtacagccacagcatcatcaccaacctgctgtaccacgtcgtcggctggaccgactggaatctggccctgaatcctgaaggcggccctaactgggtccgaaacttcgtggacagccccatcatcgtggacatcaccaaggacaccttctacaagcagcccatgttctaccacctgggacacttcagcaagttcatccccgagggctctcagcgcgttggactggtggcttcccagaagaacgatctggacgccgtggctctgatgcaccctgatggatctgctgtggtggtggtcctgaaccgcagcagcaaagatgtgcccctgaccatcaaggatcccgccgtgggattcctggaaacaatcagccctggctactccatccacacctacctgtggcgtagacagggaggggggggttcgggtggcggcggaagtgggggcggtggttctctacggaagctgcggaagcggctactgctgcggaaacttcggaaacggctactgtagtaactcgaggacggggtgaactacgcctgaggatccgatctttttccctctgccaaaaattatggggacatcatgaagccccttgagcatctgacttctggctaataaaggaaatttattttcattgcaatagtgtgttggaattttttgtgtctctcactcggcctaggtagataagtagcatggcgggttaatcattaactacaaggaacccctagtgatggagttggccactccctctctgcgcgctcgctcgctcactgaggccgggcgaccaaaggtcgcccgacgcccgggctttgcccgggcggcctcagtgagcgagcgagcgcgcag

SEQ ID NO: 1765 - DNA, 3500 bp, synthetic construct
  source 1..3500: mol_type = other DNA
ctgcgcgctcgctcgctcactgaggccgcccgggcaaagcccgggcgtcgggcgacctttggtcgcccggcctcagtgagcgagcgagcgcgcagagagggagtggccaactccatcactaggggttccttgtagttaatgattaacccgccatgctacttatctaccagggtaatggggatcctctagaactatagctagtcgacattgattattgactagttattaatagtaatcaattacggggtcattagttcatagcccatatatggagttccgcgttacataacttacggtaaatggcccgcctggctgaccgcccaacgacccccgcccattgacgtcaataatgacgtatgttcccatagtaacgccaatagggactttccattgacgtcaatgggtggagtatttacggtaaactgcccacttggcagtacatcaagtgtatcatatgccaagtacgccccctattgacgtcaatgacggtaaatggcccgcctggcattatgcccagtacatgaccttatgggactttcctacttggcagtacatctacgtattagtcatcgctattaccatgtcgaggccacgttctgcttcactctccccatctcccccccctccccacccccaattttgtatttatttattttttaattattttgtgcagcgatgggggcggggggggggggcgcgcgccaggcggggcggggcggggcgaggggcggggcggggcgaggcggagaggtgcggcggcagccaatcagagcggcgcgctccgaaagtttccttttatggcgaggcggcggcggcggcggccctataaaaagcgaagcgcgcggcgggcgggagcaagcttcgtttagtgaaccgtcagatcgcctggagacgccatccacgctgttttgacctccatagaagacaccgggaccgatccagcctccgcggattcgaatcccggccgggaacggtgcattggaacgcggattccccgtgccaagagtgacgtaagtaccgcctatagagtctataggcccacaaaaaatgctttcttcttttaatatacttttttgtttatcttatttctaatactttccctaatctctttctttcagggcaataatgatacaatgtatcatgcctctttgcaccattctaaagaataacagtgataatttctgggttaaggcaatagcaatatttctgcatataaatatttctgcatataaattgtaactgatgtaagaggtttcatattgctaatagcagctacaatccagctaccattctgcttttattttatggttgggataaggctggattattctgagtccaagctaggcccttttgctaatcatgttcatacctcttatcttcctcccacagctcctgggcaacgtgctggtctgtgtgctggcccatcactttggcaaagaattgggattcgaaccggtgccgccaccatggaattcagcagccccagcagagaggaatgccccaagcctctgagccgggtgtcaatcatggccggatctctgacaggactgctgctgcttcaggccgtgtcttgggcttctggcgctagaccttgcatccccaagagcttcggctacagcagcgtcgtgtgcgtgtgcaatgccacctactgcgacagcttcgaccctcctacctttcctgctctgggcaccttcagcagatacgagagcaccagatccggcagacggatggaactgagcatgggacccatccaggccaatcacacaggcactggcctgctgctgacactgcagcctgagcagaaattccagaaagtgaaaggcttcggcggagccatgacagatgccgccgctctgaatatcctggctctgtctccaccagctcagaacctgctgctcaagagctacttcagcgaggaaggcatcggctacaacatcatcagagtgcccatggccagctgcgacttcagcatcaggacctacacctacgccgacacacccgacgatttccagctgcacaacttcagcctgcctgaagaggacaccaagctgaagatccctctgatccacagagccctgcagctggcacaaagacccgtgtcactgctggcctctccatggacatctcccacctggctgaaaacaaatggcgccgtgaatggcaagggcagcctgaaaggccaacctggcgacatctaccaccagacctgggccagatacttcgtgaagttcctggacgcctatgccgagcacaagctgcagttttgggccgtgacagccgagaacgaaccttctgctggactgctgagcggctacccctttcagtgcctgggctttacacccgagcaccagcgggactttatcgcccgtgatctgggacccacactggccaatagcacccaccataatgtgcggctgctgatgctggacgaccagagactgcttctgccccactgggctaaagtggtgctgacagatcctgaggccgccaaatacgtgcacggaatcgccgtgcactggtatctggactttctggcccctgccaaggccacactgggagagacacacagactgttccccaacaccatgctgttcgccagcgaagcctgtgtgggcagcaagttttgggaacagagcgtgcggctcggcagctgggatagaggcatgcagtacagccacagcatcatcaccaacctgctgtaccacgtcgtcggctggaccgactggaatctggccctgaatcctgaaggcggccctaactgggtccgaaacttcgtggacagccccatcatcgtggacatcaccaaggacaccttctacaagcagcccatgttctaccacctgggacacttcagcaagttcatccccgagggctctcagcgcgttggactggtggcttcccagaagaacgatctggacgccgtggctctgatgcaccctgatggatctgctgtggtggtggtcctgaaccgcagcagcaaagatgtgcccctgaccatcaaggatcccgccgtgggattcctggaaacaatcagccctggctactccatccacacctacctgtggcgtagacagggaggggggggttcgggtggcggcggaagtgggggcggtggttcttatggcaggaaaaagcggaggcaaaggcgccgccccccccagtagtaactcgaggacggggtgaactacgcctgaggatccgatctttttccctctgccaaaaattatggggacatcatgaagccccttgagcatctgacttctggctaataaaggaaatttattttcattgcaatagtgtgttggaattttttgtgtctctcactcggcctaggtagataagtagcatggcgggttaatcattaactacaaggaacccctagtgatggagttggccactccctctctgcgcgctcgctcgctcactgaggccgggcgaccaaaggtcgcccgacgcccgggctttgcccgggcggcctcagtgagcgagcgagcgcgcag

SEQ ID NO: 1766 - DNA, 4463 bp, synthetic construct
  source 1..4463: mol_type = other DNA
ctgcgcgctcgctcgctcactgaggccgcccgggcaaagcccgggcgtcgggcgacctttggtcgcccggcctcagtgagcgagcgagcgcgcagagagggagtggccaactccatcactaggggttccttgtagttaatgattaacccgccatgctacttatctaccagggtaatggggatcctctagaactatagctagtcgacattgattattgactagttattaatagtaatcaattacggggtcattagttcatagcccatatatggagttccgcgttacataacttacggtaaatggcccgcctggctgaccgcccaacgacccccgcccattgacgtcaataatgacgtatgttcccatagtaacgccaatagggactttccattgacgtcaatgggtggagtatttacggtaaactgcccacttggcagtacatcaagtgtatcatatgccaagtacgccccctattgacgtcaatgacggtaaatggcccgcctggcattatgcccagtacatgaccttatgggactttcctacttggcagtacatctacgtattagtcatcgctattaccatgtcgaggccacgttctgcttcactctccccatctcccccccctccccacccccaattttgtatttatttattttttaattattttgtgcagcgatgggggcggggggggggggcgcgcgccaggcggggcggggcggggcgaggggcggggcggggcgaggcggagaggtgcggcggcagccaatcagagcggcgcgctccgaaagtttccttttatggcgaggcggcggcggcggcggccctataaaaagcgaagcgcgcggcgggcgggagcaagctccggtgccgccaccatggaattcagcagccccagcagagaggaatgccccaagcctctgagccgggtgtcaatcatggccggatctctgacaggactgctgctgcttcaggccgtgtcttgggcttctggcgctagaccttgcatccccaagagcttcggctacagcagcgtcgtgtgcgtgtgcaatgccacctactgcgacagcttcgaccctcctacctttcctgctctgggcaccttcagcagatacgagagcaccagatccggcagacggatggaactgagcatgggacccatccaggccaatcacacaggcactggcctgctgctgacactgcagcctgagcagaaattccagaaagtgaaaggcttcggcggagccatgacagatgccgccgctctgaatatcctggctctgtctccaccagctcagaacctgctgctcaagagctacttcagcgaggaaggcatcggctacaacatcatcagagtgcccatggccagctgcgacttcagcatcaggacctacacctacgccgacacacccgacgatttccagctgcacaacttcagcctgcctgaagaggacaccaagctgaagatccctctgatccacagagccctgcagctggcacaaagacccgtgtcactgctggcctctccatggacatctcccacctggctgaaaacaaatggcgccgtgaatggcaagggcagcctgaaaggccaacctggcgacatctaccaccagacctgggccagatacttcgtgaagttcctggacgcctatgccgagcacaagctgcagttttgggccgtgacagccgagaacgaaccttctgctggactgctgagcggctacccctttcagtgcctgggctttacacccgagcaccagcgggactttatcgcccgtgatctgggacccacactggccaatagcacccaccataatgtgcggctgctgatgctggacgaccagagactgcttctgccccactgggctaaagtggtgctgacagatcctgaggccgccaaatacgtgcacggaatcgccgtgcactggtatctggactttctggcccctgccaaggccacactgggagagacacacagactgttccccaacaccatgctgttcgccagcgaagcctgtgtgggcagcaagttttgggaacagagcgtgcggctcggcagctgggatagaggcatgcagtacagccacagcatcatcaccaacctgctgtaccacgtcgtcggctggaccgactggaatctggccctgaatcctgaaggcggccctaactgggtccgaaacttcgtggacagccccatcatcgtggacatcaccaaggacaccttctacaagcagcccatgttctaccacctgggacacttcagcaagttcatccccgagggctctcagcgcgttggactggtggcttcccagaagaacgatctggacgccgtggctctgatgcaccctgatggatctgctgtggtggtggtcctgaaccgcagcagcaaagatgtgcccctgaccatcaaggatcccgccgtgggattcctggaaacaatcagccctggctactccatccacacctacctgtggcgtagacagagaaagaggcgagagggcagaggaagtcttctaacatgcggtgacgtggaggagaatcccggccctatgtacgccctcttcctcctggccagcctcctgggcgcggctctagccggcccggtccttggactgaaagaatgcaccaggggctcggcagtgtggtgccagaatgtgaagacggcgtccgactgcggggcagtgaagcactgcctgcagaccgtttggaacaagccaacagtgaaatcccttccctgcgacatatgcaaagacgttgtcaccgcagctggtgatatgctgaaggacaatgccactgaggaggagatccttgtttacttggagaagacctgtgactggcttccgaaaccgaacatgtctgcttcatgcaaggagatagtggactcctacctccctgtcatcctggacatcattaaaggagaaatgagccgtcctggggaggtgtgctctgctctcaacctctgcgagtctctccagaagcacctagcagagctgaatcaccagaagcagctggagtccaataagatcccagagctggacatgactgaggtggtggcccccttcatggccaacatccctctcctcctctaccctcaggacggcccccgcagcaagccccagccaaaggataatggggacgtttgccaggactgcattcagatggtgactgacatccagactgctgtacggaccaactccacctttgtccaggccttggtggaacatgtcaaggaggagtgtgaccgcctgggccctggcatggccgacatatgcaagaactatatcagccagtattctgaaattgctatccagatgatgatgcacatgcaacccaaggagatctgtgcgctggttgggttctgtgatgaggtgaaagagatgcccatgcagactctggtccccgccaaagtggcctccaagaatgtcatccctgccctggaactggtggagcccattaagaagcacgaggtcccagcaaagtctgatgtttactgtgaggtgtgtgaattcctggtgaaggaggtgaccaagctgattgacaacaacaagactgagaaagaaatactcgacgcttttgacaaaatgtgctcgaagctgccgaagtccctgtcggaagagtgccaggaggtggtggacacgtacggcagctccatcctgtccatcctgctggaggaggtcagccctgagctggtgtgcagcatgctgcacctctgctctggcacgcggctgcctgcactgaccgttcacgtgactcagccaaaggacggtggcttctgcgaagtgtgcaagaagctggtgggttatttggatcgcaacctggagaaaaacagcaccaagcaggagatcctggctgctcttgagaaaggctgcagcttcctgccagacccttaccagaagcagtgtgatcagtttgtggcagagtacgagcccgtgctgatcgagatcctggtggaggtgatggatccttccttcgtgtgcttgaaaattggagcctgcccctcggcccataagcccttgttgggaactgagaagtgtatatggggcccaagctactggtgccagaacacagagacagcagcccagtgcaatgctgtcgagcattgcaaacgccatgtgtggaactagtagtaactcgaggacggggtgaactacgcctgaggatccgatctttttccctctgccaaaaattatggggacatcatgaagccccttgagcatctgacttctggctaataaaggaaatttattttcattgcaatagtgtgttggaattttttgtgtctctcactcggcctaggtagataagtagcatggcgggttaatcattaactacaaggaacccctagtgatggagttggccactccctctctgcgcgctcgctcgctcactgaggccgggcgaccaaaggtcgcccgacgcccgggctttgcccgggcggcctcagtgagcgagcgagcgcgcag

SEQ ID NO: 1767 - DNA, 3878 bp, synthetic construct
  source 1..3878: mol_type = other DNA
ctgcgcgctcgctcgctcactgaggccgcccgggcaaagcccgggcgtcgggcgacctttggtcgcccggcctcagtgagcgagcgagcgcgcagagagggagtggccaactccatcactaggggttccttgtagttaatgattaacccgccatgctacttatctaccagggtaatggggatcctctagaactatagctagtcgacattgattattgactagttattaatagtaatcaattacggggtcattagttcatagcccatatatggagttccgcgttacataacttacggtaaatggcccgcctggctgaccgcccaacgacccccgcccattgacgtcaataatgacgtatgttcccatagtaacgccaatagggactttccattgacgtcaatgggtggagtatttacggtaaactgcccacttggcagtacatcaagtgtatcatatgccaagtacgccccctattgacgtcaatgacggtaaatggcccgcctggcattatgcccagtacatgaccttatgggactttcctacttggcagtacatctacgtattagtcatcgctattaccatgtcgaggccacgttctgcttcactctccccatctcccccccctccccacccccaattttgtatttatttattttttaattattttgtgcagcgatgggggcggggggggggggcgcgcgccaggcggggcggggcggggcgaggggcggggcggggcgaggcggagaggtgcggcggcagccaatcagagcggcgcgctccgaaagtttccttttatggcgaggcggcggcggcggcggccctataaaaagcgaagcgcgcggcgggcgggagcaagcttcgtttagtgaaccgtcagatcgcctggagacgccatccacgctgttttgacctccatagaagacaccgggaccgatccagcctccgcggattcgaatcccggccgggaacggtgcattggaacgcggattccccgtgccaagagtgacgtaagtaccgcctatagagtctataggcccacaaaaaatgctttcttcttttaatatacttttttgtttatcttatttctaatactttccctaatctctttctttcagggcaataatgatacaatgtatcatgcctctttgcaccattctaaagaataacagtgataatttctgggttaaggcaatagcaatatttctgcatataaatatttctgcatataaattgtaactgatgtaagaggtttcatattgctaatagcagctacaatccagctaccattctgcttttattttatggttgggataaggctggattattctgagtccaagctaggcccttttgctaatcatgttcatacctcttatcttcctcccacagctcctgggcaacgtgctggtctgtgtgctggcccatcactttggcaaagaattgggattcgaaccggtgccgccaccatggaattcagcagccccagcagagaggaatgccccaagcctctgagccgggtgtcaatcatggccggatctctgacaggactgctgctgcttcaggccgtgtcttgggcttctggcgctagaccttgcatccccaagagcttcggctacagcagcgtcgtgtgcgtgtgcaatgccacctactgcgacagcttcgaccctcctacctttcctgctctgggcaccttcagcagatacgagagcaccagatccggcagacggatggaactgagcatgggacccatccaggccaatcacacaggcactggcctgctgctgacactgcagcctgagcagaaattccagaaagtgaaaggcttcggcggagccatgacagatgccgccgctctgaatatcctggctctgtctccaccagctcagaacctgctgctcaagagctacttcagcgaggaaggcatcggctacaacatcatcagagtgcccatggccagctgcgacttcagcatcaggacctacacctacgccgacacacccgacgatttccagctgcacaacttcagcctgcctgaagaggacaccaagctgaagatccctctgatccacagagccctgcagctggcacaaagacccgtgtcactgctggcctctccatggacatctcccacctggctgaaaacaaatggcgccgtgaatggcaagggcagcctgaaaggccaacctggcgacatctaccaccagacctgggccagatacttcgtgaagttcctggacgcctatgccgagcacaagctgcagttttgggccgtgacagccgagaacgaaccttctgctggactgctgagcggctacccctttcagtgcctgggctttacacccgagcaccagcgggactttatcgcccgtgatctgggacccacactggccaatagcacccaccataatgtgcggctgctgatgctggacgaccagagactgcttctgccccactgggctaaagtggtgctgacagatcctgaggccgccaaatacgtgcacggaatcgccgtgcactggtatctggactttctggcccctgccaaggccacactgggagagacacacagactgttccccaacaccatgctgttcgccagcgaagcctgtgtgggcagcaagttttgggaacagagcgtgcggctcggcagctgggatagaggcatgcagtacagccacagcatcatcaccaacctgctgtaccacgtcgtcggctggaccgactggaatctggccctgaatcctgaaggcggccctaactgggtccgaaacttcgtggacagccccatcatcgtggacatcaccaaggacaccttctacaagcagcccatgttctaccacctgggacacttcagcaagttcatccccgagggctctcagcgcgttggactggtggcttcccagaagaacgatctggacgccgtggctctgatgcaccctgatggatctgctgtggtggtggtcctgaaccgcagcagcaaagatgtgcccctgaccatcaaggatcccgccgtgggattcctggaaacaatcagccctggctactccatccacacctacctgtggcgtagacagagaaagaggcgagagggcagaggaagtcttctaacatgcggtgacgtggaggagaatcccggccctatgtacgccctcttcctcctggccagcctcctgggcgcggctctagccgtgaaagagatgcccatgcagactctggtccccgccaaagtggcctccaagaatgtcatccctgccctggaactggtggagcccattaagaagcacgaggtcccagcaaagtctgatgtttactgtgaggtgtgtgaattcctggtgaaggaggtgaccaagctgattgacaacaacaagactgagaaagaaatactcgacgcttttgacaaaatgtgctcgaagctgccgaagtccctgtcggaagagtgccaggaggtggtggacacgtacggcagctccatcctgtccatcctgctggaggaggtcagccctgagctggtgtgcagcatgctgcacctctgctctggctagtaactcgaggacggggtgaactacgcctgaggatccgatctttttccctctgccaaaaattatggggacatcatgaagccccttgagcatctgacttctggctaataaaggaaatttattttcattgcaatagtgtgttggaattttttgtgtctctcactcggcctaggtagataagtagcatggcgggttaatcattaactacaaggaacccctagtgatggagttggccactccctctctgcgcgctcgctcgctcactgaggccgggcgaccaaaggtcgcccgacgcccgggctttgcccgggcggcctcagtgagcgagcgagcgcgcag

SEQ ID NO: 1768 - DNA, 3767 bp, synthetic construct
  source 1..3767: mol_type = other DNA
ctgcgcgctcgctcgctcactgaggccgcccgggcaaagcccgggcgtcgggcgacctttggtcgcccggcctcagtgagcgagcgagcgcgcagagagggagtggccaactccatcactaggggttccttgtagttaatgattaacccgccatgctacttatctaccagggtaatggggatcctctagaactatagctagtcgacattgattattgactagttattaatagtaatcaattacggggtcattagttcatagcccatatatggagttccgcgttacataacttacggtaaatggcccgcctggctgaccgcccaacgacccccgcccattgacgtcaataatgacgtatgttcccatagtaacgccaatagggactttccattgacgtcaatgggtggagtatttacggtaaactgcccacttggcagtacatcaagtgtatcatatgccaagtacgccccctattgacgtcaatgacggtaaatggcccgcctggcattatgcccagtacatgaccttatgggactttcctacttggcagtacatctacgtattagtcatcgctattaccatgtcgaggccacgttctgcttcactctccccatctcccccccctccccacccccaattttgtatttatttattttttaattattttgtgcagcgatgggggcggggggggggggcgcgcgccaggcggggcggggcggggcgaggggcggggcggggcgaggcggagaggtgcggcggcagccaatcagagcggcgcgctccgaaagtttccttttatggcgaggcggcggcggcggcggccctataaaaagcgaagcgcgcggcgggcgggagcaagcttcgtttagtgaaccgtcagatcgcctggagacgccatccacgctgttttgacctccatagaagacaccgggaccgatccagcctccgcggattcgaatcccggccgggaacggtgcattggaacgcggattccccgtgccaagagtgacgtaagtaccgcctatagagtctataggcccacaaaaaatgctttcttcttttaatatacttttttgtttatcttatttctaatactttccctaatctctttctttcagggcaataatgatacaatgtatcatgcctctttgcaccattctaaagaataacagtgataatttctgggttaaggcaatagcaatatttctgcatataaatatttctgcatataaattgtaactgatgtaagaggtttcatattgctaatagcagctacaatccagctaccattctgcttttattttatggttgggataaggctggattattctgagtccaagctaggcccttttgctaatcatgttcatacctcttatcttcctcccacagctcctgggcaacgtgctggtctgtgtgctggcccatcactttggcaaagaattgggattcgaaccggtgccgccaccatggaattcagcagccccagcagagaggaatgccccaagcctctgagccgggtgtcaatcatggccggatctctgacaggactgctgctgcttcaggccgtgtcttgggcttctggcgctagaccttgcatccccaagagcttcggctacagcagcgtcgtgtgcgtgtgcaatgccacctactgcgacagcttcgaccctcctacctttcctgctctgggcaccttcagcagatacgagagcaccagatccggcagacggatggaactgagcatgggacccatccaggccaatcacacaggcactggcctgctgctgacactgcagcctgagcagaaattccagaaagtgaaaggcttcggcggagccatgacagatgccgccgctctgaatatcctggctctgtctccaccagctcagaacctgctgctcaagagctacttcagcgaggaaggcatcggctacaacatcatcagagtgcccatggccagctgcgacttcagcatcaggacctacacctacgccgacacacccgacgatttccagctgcacaacttcagcctgcctgaagaggacaccaagctgaagatccctctgatccacagagccctgcagctggcacaaagacccgtgtcactgctggcctctccatggacatctcccacctggctgaaaacaaatggcgccgtgaatggcaagggcagcctgaaaggccaacctggcgacatctaccaccagacctgggccagatacttcgtgaagttcctggacgcctatgccgagcacaagctgcagttttgggccgtgacagccgagaacgaaccttctgctggactgctgagcggctacccctttcagtgcctgggctttacacccgagcaccagcgggactttatcgcccgtgatctgggacccacactggccaatagcacccaccataatgtgcggctgctgatgctggacgaccagagactgcttctgccccactgggctaaagtggtgctgacagatcctgaggccgccaaatacgtgcacggaatcgccgtgcactggtatctggactttctggcccctgccaaggccacactgggagagacacacagactgttccccaacaccatgctgttcgccagcgaagcctgtgtgggcagcaagttttgggaacagagcgtgcggctcggcagctgggatagaggcatgcagtacagccacagcatcatcaccaacctgctgtaccacgtcgtcggctggaccgactggaatctggccctgaatcctgaaggcggccctaactgggtccgaaacttcgtggacagccccatcatcgtggacatcaccaaggacaccttctacaagcagcccatgttctaccacctgggacacttcagcaagttcatccccgagggctctcagcgcgttggactggtggcttcccagaagaacgatctggacgccgtggctctgatgcaccctgatggatctgctgtggtggtggtcctgaaccgcagcagcaaagatgtgcccctgaccatcaaggatcccgccgtgggattcctggaaacaatcagccctggctactccatccacacctacctgtggcgtagacagagaaagaggcgagagggcagaggaagtcttctaacatgcggtgacgtggaggagaatcccggccctatgtacgccctcttcctcctggccagcctcctgggcgcggctctagcctctgatgtttactgtgaggtgtgtgaattcctggtgaaggaggtgaccaagctgattgacaacaacaagactgagaaagaaatactcgacgcttttgacaaaatgtgctcgaagctgccgaagtccctgtcggaagagtgccaggaggtggtggacacgtacggcagctccatcctgtccatcctgctggaggaggtcagccctgagctggtgtgcagcatgctgcacctctgctctggctagtaactcgaggacggggtgaactacgcctgaggatccgatctttttccctctgccaaaaattatggggacatcatgaagccccttgagcatctgacttctggctaataaaggaaatttattttcattgcaatagtgtgttggaattttttgtgtctctcactcggcctaggtagataagtagcatggcgggttaatcattaactacaaggaacccctagtgatggagttggccactccctctctgcgcgctcgctcgctcactgaggccgggcgaccaaaggtcgcccgacgcccgggctttgcccgggcggcctcagtgagcgagcgagcgcgcag

SEQ ID NO: 1769 - DNA, 3560 bp, synthetic construct
  source 1..3560: mol_type = other DNA
ctgcgcgctcgctcgctcactgaggccgcccgggcaaagcccgggcgtcgggcgacctttggtcgcccggcctcagtgagcgagcgagcgcgcagagagggagtggccaactccatcactaggggttccttgtagttaatgattaacccgccatgctacttatctaccagggtaatggggatcctctagaactatagctagtcgacattgattattgactagttattaatagtaatcaattacggggtcattagttcatagcccatatatggagttccgcgttacataacttacggtaaatggcccgcctggctgaccgcccaacgacccccgcccattgacgtcaataatgacgtatgttcccatagtaacgccaatagggactttccattgacgtcaatgggtggagtatttacggtaaactgcccacttggcagtacatcaagtgtatcatatgccaagtacgccccctattgacgtcaatgacggtaaatggcccgcctggcattatgcccagtacatgaccttatgggactttcctacttggcagtacatctacgtattagtcatcgctattaccatgtcgaggccacgttctgcttcactctccccatctcccccccctccccacccccaattttgtatttatttattttttaattattttgtgcagcgatgggggcggggggggggggcgcgcgccaggcggggcggggcggggcgaggggcggggcggggcgaggcggagaggtgcggcggcagccaatcagagcggcgcgctccgaaagtttccttttatggcgaggcggcggcggcggcggccctataaaaagcgaagcgcgcggcgggcgggagcaagcttcgtttagtgaaccgtcagatcgcctggagacgccatccacgctgttttgacctccatagaagacaccgggaccgatccagcctccgcggattcgaatcccggccgggaacggtgcattggaacgcggattccccgtgccaagagtgacgtaagtaccgcctatagagtctataggcccacaaaaaatgctttcttcttttaatatacttttttgtttatcttatttctaatactttccctaatctctttctttcagggcaataatgatacaatgtatcatgcctctttgcaccattctaaagaataacagtgataatttctgggttaaggcaatagcaatatttctgcatataaatatttctgcatataaattgtaactgatgtaagaggtttcatattgctaatagcagctacaatccagctaccattctgcttttattttatggttgggataaggctggattattctgagtccaagctaggcccttttgctaatcatgttcatacctcttatcttcctcccacagctcctgggcaacgtgctggtctgtgtgctggcccatcactttggcaaagaattgggattcgaaccggtgccgccaccatggaattcagcagccccagcagagaggaatgccccaagcctctgagccgggtgtcaatcatggccggatctctgacaggactgctgctgcttcaggccgtgtcttgggcttctggcgctagaccttgcatccccaagagcttcggctacagcagcgtcgtgtgcgtgtgcaatgccacctactgcgacagcttcgaccctcctacctttcctgctctgggcaccttcagcagatacgagagcaccagatccggcagacggatggaactgagcatgggacccatccaggccaatcacacaggcactggcctgctgctgacactgcagcctgagcagaaattccagaaagtgaaaggcttcggcggagccatgacagatgccgccgctctgaatatcctggctctgtctccaccagctcagaacctgctgctcaagagctacttcagcgaggaaggcatcggctacaacatcatcagagtgcccatggccagctgcgacttcagcatcaggacctacacctacgccgacacacccgacgatttccagctgcacaacttcagcctgcctgaagaggacaccaagctgaagatccctctgatccacagagccctgcagctggcacaaagacccgtgtcactgctggcctctccatggacatctcccacctggctgaaaacaaatggcgccgtgaatggcaagggcagcctgaaaggccaacctggcgacatctaccaccagacctgggccagatacttcgtgaagttcctggacgcctatgccgagcacaagctgcagttttgggccgtgacagccgagaacgaaccttctgctggactgctgagcggctacccctttcagtgcctgggctttacacccgagcaccagcgggactttatcgcccgtgatctgggacccacactggccaatagcacccaccataatgtgcggctgctgatgctggacgaccagagactgcttctgccccactgggctaaagtggtgctgacagatcctgaggccgccaaatacgtgcacggaatcgccgtgcactggtatctggactttctggcccctgccaaggccacactgggagagacacacagactgttccccaacaccatgctgttcgccagcgaagcctgtgtgggcagcaagttttgggaacagagcgtgcggctcggcagctgggatagaggcatgcagtacagccacagcatcatcaccaacctgctgtaccacgtcgtcggctggaccgactggaatctggccctgaatcctgaaggcggccctaactgggtccgaaacttcgtggacagccccatcatcgtggacatcaccaaggacaccttctacaagcagcccatgttctaccacctgggacacttcagcaagttcatccccgagggctctcagcgcgttggactggtggcttcccagaagaacgatctggacgccgtggctctgatgcaccctgatggatctgctgtggtggtggtcctgaaccgcagcagcaaagatgtgcccctgaccatcaaggatcccgccgtgggattcctggaaacaatcagccctggctactccatccacacctacctgtggcgtagacagggaggggggggttcgggtggcggcggaagtgggggcggtggttcttccgtaatcgacgccttacagtataagctggagggaaccaccagattgacaaggaaacgagggcttaagcttgctactgcactatccctgagcaataaattttagtaactcgaggacggggtgaactacgcctgaggatccgatctttttccctctgccaaaaattatggggacatcatgaagccccttgagcatctgacttctggctaataaaggaaatttattttcattgcaatagtgtgttggaattttttgtgtctctcactcggcctaggtagataagtagcatggcgggttaatcattaactacaaggaacccctagtgatggagttggccactccctctctgcgcgctcgctcgctcactgaggccgggcgaccaaaggtcgcccgacgcccgggctttgcccgggcggcctcagtgagcgagcgagcgcgcag

SEQ ID NO: 1770 - DNA, 3500 bp, synthetic construct
  source 1..3500: mol_type = other DNA
ctgcgcgctcgctcgctcactgaggccgcccgggcaaagcccgggcgtcgggcgacctttggtcgcccggcctcagtgagcgagcgagcgcgcagagagggagtggccaactccatcactaggggttccttgtagttaatgattaacccgccatgctacttatctaccagggtaatggggatcctctagaactatagctagtcgacattgattattgactagttattaatagtaatcaattacggggtcattagttcatagcccatatatggagttccgcgttacataacttacggtaaatggcccgcctggctgaccgcccaacgacccccgcccattgacgtcaataatgacgtatgttcccatagtaacgccaatagggactttccattgacgtcaatgggtggagtatttacggtaaactgcccacttggcagtacatcaagtgtatcatatgccaagtacgccccctattgacgtcaatgacggtaaatggcccgcctggcattatgcccagtacatgaccttatgggactttcctacttggcagtacatctacgtattagtcatcgctattaccatgtcgaggccacgttctgcttcactctccccatctcccccccctccccacccccaattttgtatttatttattttttaattattttgtgcagcgatgggggcggggggggggggcgcgcgccaggcggggcggggcggggcgaggggcggggcggggcgaggcggagaggtgcggcggcagccaatcagagcggcgcgctccgaaagtttccttttatggcgaggcggcggcggcggcggccctataaaaagcgaagcgcgcggcgggcgggagcaagcttcgtttagtgaaccgtcagatcgcctggagacgccatccacgctgttttgacctccatagaagacaccgggaccgatccagcctccgcggattcgaatcccggccgggaacggtgcattggaacgcggattccccgtgccaagagtgacgtaagtaccgcctatagagtctataggcccacaaaaaatgctttcttcttttaatatacttttttgtttatcttatttctaatactttccctaatctctttctttcagggcaataatgatacaatgtatcatgcctctttgcaccattctaaagaataacagtgataatttctgggttaaggcaatagcaatatttctgcatataaatatttctgcatataaattgtaactgatgtaagaggtttcatattgctaatagcagctacaatccagctaccattctgcttttattttatggttgggataaggctggattattctgagtccaagctaggcccttttgctaatcatgttcatacctcttatcttcctcccacagctcctgggcaacgtgctggtctgtgtgctggcccatcactttggcaaagaattgggattcgaaccggtgccgccaccatggaattcagcagccccagcagagaggaatgccccaagcctctgagccgggtgtcaatcatggccggatctctgacaggactgctgctgcttcaggccgtgtcttgggcttctggctatggcaggaaaaagcggaggcaaaggcgccgccccccccagggaggggggggttcgggtggcggcggaagtgggggcggtggttctgctagaccttgcatccccaagagcttcggctacagcagcgtcgtgtgcgtgtgcaatgccacctactgcgacagcttcgaccctcctacctttcctgctctgggcaccttcagcagatacgagagcaccagatccggcagacggatggaactgagcatgggacccatccaggccaatcacacaggcactggcctgctgctgacactgcagcctgagcagaaattccagaaagtgaaaggcttcggcggagccatgacagatgccgccgctctgaatatcctggctctgtctccaccagctcagaacctgctgctcaagagctacttcagcgaggaaggcatcggctacaacatcatcagagtgcccatggccagctgcgacttcagcatcaggacctacacctacgccgacacacccgacgatttccagctgcacaacttcagcctgcctgaagaggacaccaagctgaagatccctctgatccacagagccctgcagctggcacaaagacccgtgtcactgctggcctctccatggacatctcccacctggctgaaaacaaatggcgccgtgaatggcaagggcagcctgaaaggccaacctggcgacatctaccaccagacctgggccagatacttcgtgaagttcctggacgcctatgccgagcacaagctgcagttttgggccgtgacagccgagaacgaaccttctgctggactgctgagcggctacccctttcagtgcctgggctttacacccgagcaccagcgggactttatcgcccgtgatctgggacccacactggccaatagcacccaccataatgtgcggctgctgatgctggacgaccagagactgcttctgccccactgggctaaagtggtgctgacagatcctgaggccgccaaatacgtgcacggaatcgccgtgcactggtatctggactttctggcccctgccaaggccacactgggagagacacacagactgttccccaacaccatgctgttcgccagcgaagcctgtgtgggcagcaagttttgggaacagagcgtgcggctcggcagctgggatagaggcatgcagtacagccacagcatcatcaccaacctgctgtaccacgtcgtcggctggaccgactggaatctggccctgaatcctgaaggcggccctaactgggtccgaaacttcgtggacagccccatcatcgtggacatcaccaaggacaccttctacaagcagcccatgttctaccacctgggacacttcagcaagttcatccccgagggctctcagcgcgttggactggtggcttcccagaagaacgatctggacgccgtggctctgatgcaccctgatggatctgctgtggtggtggtcctgaaccgcagcagcaaagatgtgcccctgaccatcaaggatcccgccgtgggattcctggaaacaatcagccctggctactccatccacacctacctgtggcgtagacagtagtaactcgaggacggggtgaactacgcctgaggatccgatctttttccctctgccaaaaattatggggacatcatgaagccccttgagcatctgacttctggctaataaaggaaatttattttcattgcaatagtgtgttggaattttttgtgtctctcactcggcctaggtagataagtagcatggcgggttaatcattaactacaaggaacccctagtgatggagttggccactccctctctgcgcgctcgctcgctcactgaggccgggcgaccaaaggtcgcccgacgcccgggctttgcccgggcggcctcagtgagcgagcgagcgcgcag

SEQ ID NO: 1771 - DNA, 3458 bp, synthetic construct
  source 1..3458: mol_type = other DNA
ctgcgcgctcgctcgctcactgaggccgcccgggcaaagcccgggcgtcgggcgacctttggtcgcccggcctcagtgagcgagcgagcgcgcagagagggagtggccaactccatcactaggggttccttgtagttaatgattaacccgccatgctacttatctaccagggtaatggggatcctctagaactatagctagtcgacattgattattgactagttattaatagtaatcaattacggggtcattagttcatagcccatatatggagttccgcgttacataacttacggtaaatggcccgcctggctgaccgcccaacgacccccgcccattgacgtcaataatgacgtatgttcccatagtaacgccaatagggactttccattgacgtcaatgggtggagtatttacggtaaactgcccacttggcagtacatcaagtgtatcatatgccaagtacgccccctattgacgtcaatgacggtaaatggcccgcctggcattatgcccagtacatgaccttatgggactttcctacttggcagtacatctacgtattagtcatcgctattaccatgtcgaggccacgttctgcttcactctccccatctcccccccctccccacccccaattttgtatttatttattttttaattattttgtgcagcgatgggggcggggggggggggcgcgcgccaggcggggcggggcggggcgaggggcggggcggggcgaggcggagaggtgcggcggcagccaatcagagcggcgcgctccgaaagtttccttttatggcgaggcggcggcggcggcggccctataaaaagcgaagcgcgcggcgggcgggagcaagcttcgtttagtgaaccgtcagatcgcctggagacgccatccacgctgttttgacctccatagaagacaccgggaccgatccagcctccgcggattcgaatcccggccgggaacggtgcattggaacgcggattccccgtgccaagagtgacgtaagtaccgcctatagagtctataggcccacaaaaaatgctttcttcttttaatatacttttttgtttatcttatttctaatactttccctaatctctttctttcagggcaataatgatacaatgtatcatgcctctttgcaccattctaaagaataacagtgataatttctgggttaaggcaatagcaatatttctgcatataaatatttctgcatataaattgtaactgatgtaagaggtttcatattgctaatagcagctacaatccagctaccattctgcttttattttatggttgggataaggctggattattctgagtccaagctaggcccttttgctaatcatgttcatacctcttatcttcctcccacagctcctgggcaacgtgctggtctgtgtgctggcccatcactttggcaaagaattgggattcgaaccggtgccgccaccatggaattcagcagccccagcagagaggaatgccccaagcctctgagccgggtgtcaatcatggccggatctctgacaggactgctgctgcttcaggccgtgtcttgggcttctggcgctagaccttgcatccccaagagcttcggctacagcagcgtcgtgtgcgtgtgcaatgccacctactgcgacagcttcgaccctcctacctttcctgctctgggcaccttcagcagatacgagagcaccagatccggcagacggatggaactgagcatgggacccatccaggccaatcacacaggcactggcctgctgctgacactgcagcctgagcagaaattccagaaagtgaaaggcttcggcggagccatgacagatgccgccgctctgaatatcctggctctgtctccaccagctcagaacctgctgctcaagagctacttcagcgaggaaggcatcggctacaacatcatcagagtgcccatggccagctgcgacttcagcatcaggacctacacctacgccgacacacccgacgatttccagctgcacaacttcagcctgcctgaagaggacaccaagctgaagatccctctgatccacagagccctgcagctggcacaaagacccgtgtcactgctggcctctccatggacatctcccacctggctgaaaacaaatggcgccgtgaatggcaagggcagcctgaaaggccaacctggcgacatctaccaccagacctgggccagatacttcgtgaagttcctggacgcctatgccgagcacaagctgcagttttgggccgtgacagccgagaacgaaccttctgctggactgctgagcggctacccctttcagtgcctgggctttacacccgagcaccagcgggactttatcgcccgtgatctgggacccacactggccaatagcacccaccataatgtgcggctgctgatgctggacgaccagagactgcttctgccccactgggctaaagtggtgctgacagatcctgaggccgccaaatacgtgcacggaatcgccgtgcactggtatctggactttctggcccctgccaaggccacactgggagagacacacagactgttccccaacaccatgctgttcgccagcgaagcctgtgtgggcagcaagttttgggaacagagcgtgcggctcggcagctgggatagaggcatgcagtacagccacagcatcatcaccaacctgctgtaccacgtcgtcggctggaccgactggaatctggccctgaatcctgaaggcggccctaactgggtccgaaacttcgtggacagccccatcatcgtggacatcaccaaggacaccttctacaagcagcccatgttctaccacctgggacacttcagcaagttcatccccgagggctctcagcgcgttggactggtggcttcccagaagaacgatctggacgccgtggctctgatgcaccctgatggatctgctgtggtggtggtcctgaaccgcagcagcaaagatgtgcccctgaccatcaaggatcccgccgtgggattcctggaaacaatcagccctggctactccatccacacctacctgtggcgtagacagaagtttgaaagacagcagaaaatcctggatcagagattcttcgagtagtaactcgaggacggggtgaactacgcctgaggatccgatctttttccctctgccaaaaattatggggacatcatgaagccccttgagcatctgacttctggctaataaaggaaatttattttcattgcaatagtgtgttggaattttttgtgtctctcactcggcctaggtagataagtagcatggcgggttaatcattaactacaaggaacccctagtgatggagttggccactccctctctgcgcgctcgctcgctcactgaggccgggcgaccaaaggtcgcccgacgcccgggctttgcccgggcggcctcagtgagcgagcgagcgcgcag

SEQ ID NO: 1772 - DNA, 1608 bp, synthetic construct
  source 1..1608: mol_type = other DNA
atggaattctctagcccatctagagaggaatgtcctaagcctctgtcaagagtgtccatcatggccggcagcctgacaggcctgctgctgctgcaggccgtgtcctgggccagtggagcccggccctgcatccctaagtccttcggctattctagcgtggtctgcgtgtgtaatgccacttactgcgacagcttcgaccctcctaccttccccgcccttggaacattcagcagatacgagagcaccagaagcggcagaagaatggaactgagcatgggcccaatccaggccaaccacaccggcaccggcctgctgctgacactgcaacctgagcagaagttccagaaggtgaagggatttggaggcgccatgaccgacgctgctgctctgaacatcctggccctctccccacctgctcagaacctgctgcttaaaagctacttcagcgaggaaggcatcggctataacatcatcagagtgcccatggccagctgcgacttcagcatcagaacatacacctacgccgatacacctgatgacttccaactgcacaacttcagcctgcctgaagaggacacaaagctgaaaatccccctgatccaccgggccctgcagctggcccagagacctgtgagcctgctggcctctccttggacaagccccacctggctgaagaccaatggagctgtgaacggcaagggcagcctgaagggccagcccggcgacatctaccaccaaacctgggctcgctacttcgtgaaattcctggacgcctacgctgagcataagctgcaattttgggccgttacagccgagaacgagccttctgccggcctgctgtctggatatcctttccagtgcctgggcttcacccctgagcaccagagagactttatcgccagagatctggggcctaccctggctaacagcacacaccacaacgtgcggctgctgatgctggacgatcagaggctgctgctcccccactgggccaaggtggtgctgacagatccggaggccgccaaatacgtgcacggcatcgccgtccactggtacctggatttcctggcccctgccaaggccaccctgggcgagacacatagactgtttcctaataccatgctgttcgccagcgaggcctgcgtgggcagcaagttctgggaacagagcgtgcggctgggcagctgggacagaggaatgcagtacagccacagcatcattaccaacctgctgtaccacgtggtgggctggaccgactggaacctggccctgaaccccgaaggcggccccaactgggtgcggaacttcgtggactctcctatcatcgtggatattaccaaggataccttttacaagcagcctatgttctaccacctgggccacttcagcaagttcatccctgagggctctcagcgggtgggcctggtggcctctcagaaaaacgacctggatgccgttgccctgatgcaccccgacggcagcgccgtggtggtcgtcctgaatagaagctccaaggacgtgcctctgaccatcaaggaccccgctgtgggatttctggaaaccatcagccctggctacagcatccacacctacctgtggcggcggcag

SEQ ID NO: 1773 - DNA, 1491 bp, synthetic construct
  source 1..1491: mol_type = other DNA
gcccggccctgcatccctaagtccttcggctattctagcgtggtctgcgtgtgtaatgccacttactgcgacagcttcgaccctcctaccttccccgcccttggaacattcagcagatacgagagcaccagaagcggcagaagaatggaactgagcatgggcccaatccaggccaaccacaccggcaccggcctgctgctgacactgcaacctgagcagaagttccagaaggtgaagggatttggaggcgccatgaccgacgctgctgctctgaacatcctggccctctccccacctgctcagaacctgctgcttaaaagctacttcagcgaggaaggcatcggctataacatcatcagagtgcccatggccagctgcgacttcagcatcagaacatacacctacgccgatacacctgatgacttccaactgcacaacttcagcctgcctgaagaggacacaaagctgaaaatccccctgatccaccgggccctgcagctggcccagagacctgtgagcctgctggcctctccttggacaagccccacctggctgaagaccaatggagctgtgaacggcaagggcagcctgaagggccagcccggcgacatctaccaccaaacctgggctcgctacttcgtgaaattcctggacgcctacgctgagcataagctgcaattttgggccgttacagccgagaacgagccttctgccggcctgctgtctggatatcctttccagtgcctgggcttcacccctgagcaccagagagactttatcgccagagatctggggcctaccctggctaacagcacacaccacaacgtgcggctgctgatgctggacgatcagaggctgctgctcccccactgggccaaggtggtgctgacagatccggaggccgccaaatacgtgcacggcatcgccgtccactggtacctggatttcctggcccctgccaaggccaccctgggcgagacacatagactgtttcctaataccatgctgttcgccagcgaggcctgcgtgggcagcaagttctgggaacagagcgtgcggctgggcagctgggacagaggaatgcagtacagccacagcatcattaccaacctgctgtaccacgtggtgggctggaccgactggaacctggccctgaaccccgaaggcggccccaactgggtgcggaacttcgtggactctcctatcatcgtggatattaccaaggataccttttacaagcagcctatgttctaccacctgggccacttcagcaagttcatccctgagggctctcagcgggtgggcctggtggcctctcagaaaaacgacctggatgccgttgccctgatgcaccccgacggcagcgccgtggtggtcgtcctgaatagaagctccaaggacgtgcctctgaccatcaaggaccccgctgtgggatttctggaaaccatcagccctggctacagcatccacacctacctgtggcggcggcag

SEQ ID NO: 1774 - protein, 536 aa, synthetic construct
MEFSSPSREECPKPLSRVSIMAGSLTGLLLLQAVSWASGARPCIPKSFGYSSVVCVCNATYCDSFDPPTFPALGTFSRYESTRSGRRMELSMGPIQANHTGTGLLLTLQPEQKFQKVKGFGGAMTDAAALNILALSPPAQNLLLKSYFSEEGIGYNIIRVPMASCDFSIRTYTYADTPDDFQLHNFSLPEEDTKLKIPLIHRALQLAQRPVSLLASPWTSPTWLKTNGAVNGKGSLKGQPGDIYHQTWARYFVKFLDAYAEHKLQFWAVTAENEPSAGLLSGYPFQCLGFTPEHQRDFIARDLGPTLANSTHHNVRLLMLDDQRLLLPHWAKVVLTDPEAAKYVHGIAVHWYLDFLAPAKATLGETHRLFPNTMLFASEACVGSKFWEQSVRLGSWDRGMQYSHSIITNLLYHVVGWTDWNLALNPEGGPNWVRNFVDSPIIVDITKDTFYKQPMFYHLGHFSKFIPEGSQRVGLVASQKNDLDAVALMHPDGSAVVVVLNRSSKDVPLTIKDPAVGFLETISPGYSIHTYLWRRQ

SEQ ID NO: 1775 - protein, 497 aa, synthetic construct
ARPCIPKSFGYSSVVCVCNATYCDSFDPPTFPALGTFSRYESTRSGRRMELSMGPIQANHTGTGLLLTLQPEQKFQKVKGFGGAMTDAAALNILALSPPAQNLLLKSYFSEEGIGYNIIRVPMASCDFSIRTYTYADTPDDFQLHNFSLPEEDTKLKIPLIHRALQLAQRPVSLLASPWTSPTWLKTNGAVNGKGSLKGQPGDIYHQTWARYFVKFLDAYAEHKLQFWAVTAENEPSAGLLSGYPFQCLGFTPEHQRDFIARDLGPTLANSTHHNVRLLMLDDQRLLLPHWAKVVLTDPEAAKYVHGIAVHWYLDFLAPAKATLGETHRLFPNTMLFASEACVGSKFWEQSVRLGSWDRGMQYSHSIITNLLYHVVGWTDWNLALNPEGGPNWVRNFVDSPIIVDITKDTFYKQPMFYHLGHFSKFIPEGSQRVGLVASQKNDLDAVALMHPDGSAVVVVLNRSSKDVPLTIKDPAVGFLETISPGYSIHTYLWRRQ

SEQ ID NO: 1776 - DNA, 1608 bp, synthetic construct
  source 1..1608: mol_type = other DNA
atggagttttcaagtccttccagagaggaatgtcccaagcctttgagtagggtaagcatcatggctggcagcctcacaggattgcttctacttcaggcagtgtcgtgggcatcaggtgcccgcccctgcatccctaaaagcttcggctacagctcggtggtgtgtgtctgcaatgccacatactgtgactcctttgaccccccgacctttcctgcccttggtaccttcagccgctatgagagtacacgcagtgggcgacggatggagctgagtatggggcccatccaggctaatcacacgggcacaggcctgctactgaccctgcagccagaacagaagttccagaaagtgaagggatttggaggggccatgacagatgctgctgctctcaacatccttgccctgtcaccccctgcccaaaatttgctacttaaatcgtacttctctgaagaaggaatcggatataacatcatccgggtacccatggccagctgtgacttctccatccgcacctacacctatgcagacacccctgatgatttccagttgcacaacttcagcctcccagaggaagataccaagctcaagatacccctgattcaccgagccctgcagttggcccagcgtcccgtttcactccttgccagcccctggacatcacccacttggctcaagaccaatggagcggtgaatgggaaggggtcactcaagggacagcccggagacatctaccaccagacctgggccagatactttgtgaagttcctggatgcctatgctgagcacaagttacagttctgggcagtgacagctgaaaatgagccttctgctgggctgttgagtggataccccttccagtgcctgggcttcacccctgaacatcagcgagacttcattgcccgtgacctaggtcctaccctcgccaacagtactcaccacaatgtccgcctactcatgctggatgaccaacgcttgctgctgccccactgggcaaaggtggtactgacagacccagaagcagctaaatatgttcatggcattgctgtacattggtacctggactttctggctccagccaaagccaccctaggggagacacaccgcctgttccccaacaccatgctctttgcctcagaggcctgtgtgggctccaagttctgggagcagagtgtgcggctaggctcctgggatcgagggatgcagtacagccacagcatcatcacgaacctcctgtaccatgtggtcggctggaccgactggaaccttgccctgaaccccgaaggaggacccaattgggtgcgtaactttgtcgacagtcccatcattgtagacatcaccaaggacacgttttacaaacagcccatgttctaccaccttggccacttcagcaagttcattcctgagggctcccagagagtggggctggttgccagtcagaagaacgacctggacgcagtggcactgatgcatcccgatggctctgctgttgtggtcgtgctaaaccgctcctctaaggatgtgcctcttaccatcaaggatcctgctgtgggcttcctggagacaatctcacctggctactccattcacacctacctgtggcgtcgccag

SEQ ID NO: 1777 - DNA, 1491 bp, synthetic construct
  source 1..1491: mol_type = other DNA
gcccgcccctgcatccctaaaagcttcggctacagctcggtggtgtgtgtctgcaatgccacatactgtgactcctttgaccccccgacctttcctgcccttggtaccttcagccgctatgagagtacacgcagtgggcgacggatggagctgagtatggggcccatccaggctaatcacacgggcacaggcctgctactgaccctgcagccagaacagaagttccagaaagtgaagggatttggaggggccatgacagatgctgctgctctcaacatccttgccctgtcaccccctgcccaaaatttgctacttaaatcgtacttctctgaagaaggaatcggatataacatcatccgggtacccatggccagctgtgacttctccatccgcacctacacctatgcagacacccctgatgatttccagttgcacaacttcagcctcccagaggaagataccaagctcaagatacccctgattcaccgagccctgcagttggcccagcgtcccgtttcactccttgccagcccctggacatcacccacttggctcaagaccaatggagcggtgaatgggaaggggtcactcaagggacagcccggagacatctaccaccagacctgggccagatactttgtgaagttcctggatgcctatgctgagcacaagttacagttctgggcagtgacagctgaaaatgagccttctgctgggctgttgagtggataccccttccagtgcctgggcttcacccctgaacatcagcgagacttcattgcccgtgacctaggtcctaccctcgccaacagtactcaccacaatgtccgcctactcatgctggatgaccaacgcttgctgctgccccactgggcaaaggtggtactgacagacccagaagcagctaaatatgttcatggcattgctgtacattggtacctggactttctggctccagccaaagccaccctaggggagacacaccgcctgttccccaacaccatgctctttgcctcagaggcctgtgtgggctccaagttctgggagcagagtgtgcggctaggctcctgggatcgagggatgcagtacagccacagcatcatcacgaacctcctgtaccatgtggtcggctggaccgactggaaccttgccctgaaccccgaaggaggacccaattgggtgcgtaactttgtcgacagtcccatcattgtagacatcaccaaggacacgttttacaaacagcccatgttctaccaccttggccacttcagcaagttcattcctgagggctcccagagagtggggctggttgccagtcagaagaacgacctggacgcagtggcactgatgcatcccgatggctctgctgttgtggtcgtgctaaaccgctcctctaaggatgtgcctcttaccatcaaggatcctgctgtgggcttcctggagacaatctcacctggctactccattcacacctacctgtggcgtcgccag

SEQ ID NO: 1778 - protein, 536 aa, synthetic construct; identical to SEQ ID NO: 1774

SEQ ID NO: 1779 - protein, 497 aa, synthetic construct; identical to SEQ ID NO: 1775

SEQ ID NO: 1780 - DNA, 1608 bp, synthetic construct
  source 1..1608: mol_type = other DNA
atggaattcagcagccccagcagagaggaatgccccaagcctctgagccgggtgtcaatcatggccggatctctgacaggactgctgctgcttcaggccgtgtcttgggcttctggcgctagaccttgcatccccaagagcttcggctacagcagcgtcgtgtgcgtgtgcaatgccacctactgcgacagcttcgaccctcctacctttcctgctctgggcaccttcagcagatacgagagcaccagatccggcagacggatggaactgagcatgggacccatccaggccaatcacacaggcactggcctgctgctgacactgcagcctgagcagaaattccagaaagtgaaaggcttcggcggagccatgacagatgccgccgctctgaatatcctggctctgtctccaccagctcagaacctgctgctcaagagctacttcagcgaggaaggcatcggctacaacatcatcagagtgcccatggccagctgcgacttcagcatcaggacctacacctacgccgacacacccgacgatttccagctgcacaacttcagcctgcctgaagaggacaccaagctgaagatccctctgatccacagagccctgcagctggcacaaagacccgtgtcactgctggcctctccatggacatctcccacctggctgaaaacaaatggcgccgtgaatggcaagggcagcctgaaaggccaacctggcgacatctaccaccagacctgggccagatacttcgtgaagttcctggacgcctatgccgagcacaagctgcagttttgggccgtgacagccgagaacgaaccttctgctggactgctgagcggctacccctttcagtgcctgggctttacacccgagcaccagcgggactttatcgcccgtgatctgggacccacactggccaatagcacccaccataatgtgcggctgctgatgctggacgaccagagactgcttctgccccactgggctaaagtggtgctgacagatcctgaggccgccaaatacgtgcacggaatcgccgtgcactggtatctggactttctggcccctgccaaggccacactgggagagacacacagactgttccccaacaccatgctgttcgccagcgaagcctgtgtgggcagcaagttttgggaacagagcgtgcggctcggcagctgggatagaggcatgcagtacagccacagcatcatcaccaacctgctgtaccacgtcgtcggctggaccgactggaatctggccctgaatcctgaaggcggccctaactgggtccgaaacttcgtggacagccccatcatcgtggacatcaccaaggacaccttctacaagcagcccatgttctaccacctgggacacttcagcaagttcatccccgagggctctcagcgcgttggactggtggcttcccagaagaacgatctggacgccgtggctctgatgcaccctgatggatctgctgtggtggtggtcctgaaccgcagcagcaaagatgtgcccctgaccatcaaggatcccgccgtgggattcctggaaacaatcagccctggctactccatccacacctacctgtggcgtagacag

SEQ ID NO: 1781 - DNA, 1491 bp, synthetic construct
  source 1..1491: mol_type = other DNA
gctagaccttgcatccccaagagcttcggctacagcagcgtcgtgtgcgtgtgcaatgccacctactgcgacagcttcgaccctcctacctttcctgctctgggcaccttcagcagatacgagagcaccagatccggcagacggatggaactgagcatgggacccatccaggccaatcacacaggcactggcctgctgctgacactgcagcctgagcagaaattccagaaagtgaaaggcttcggcggagccatgacagatgccgccgctctgaatatcctggctctgtctccaccagctcagaacctgctgctcaagagctacttcagcgaggaaggcatcggctacaacatcatcagagtgcccatggccagctgcgacttcagcatcaggacctacacctacgccgacacacccgacgatttccagctgcacaacttcagcctgcctgaagaggacaccaagctgaagatccctctgatccacagagccctgcagctggcacaaagacccgtgtcactgctggcctctccatggacatctcccacctggctgaaaacaaatggcgccgtgaatggcaagggcagcctgaaaggccaacctggcgacatctaccaccagacctgggccagatacttcgtgaagttcctggacgcctatgccgagcacaagctgcagttttgggccgtgacagccgagaacgaaccttctgctggactgctgagcggctacccctttcagtgcctgggctttacacccgagcaccagcgggactttatcgcccgtgatctgggacccacactggccaatagcacccaccataatgtgcggctgctgatgctggacgaccagagactgcttctgccccactgggctaaagtggtgctgacagatcctgaggccgccaaatacgtgcacggaatcgccgtgcactggtatctggactttctggcccctgccaaggccacactgggagagacacacagactgttccccaacaccatgctgttcgccagcgaagcctgtgtgggcagcaagttttgggaacagagcgtgcggctcggcagctgggatagaggcatgcagtacagccacagcatcatcaccaacctgctgtaccacgtcgtcggctggaccgactggaatctggccctgaatcctgaaggcggccctaactgggtccgaaacttcgtggacagccccatcatcgtggacatcaccaaggacaccttctacaagcagcccatgttctaccacctgggacacttcagcaagttcatccccgagggctctcagcgcgttggactggtggcttcccagaagaacgatctggacgccgtggctctgatgcaccctgatggatctgctgtggtggtggtcctgaaccgcagcagcaaagatgtgcccctgaccatcaaggatcccgccgtgggattcctggaaacaatcagccctggctactccatccacacctacctgtggcgtagacag

SEQ ID NO: 1782 - protein, 536 aa, synthetic construct; identical to SEQ ID NO: 1774

SEQ ID NO: 1783 - protein, 497 aa, synthetic construct; identical to SEQ ID NO: 1775

SEQ ID NO: 1784 - protein, 18 aa, synthetic construct
KTINGHSSPHYFGQNQQT

SEQ ID NO: 1785 - protein, 18 aa, synthetic construct
KIEMGHDSPHKSGQNQQT

SEQ ID NO: 1786 - protein, 18 aa, synthetic construct
KTANEHDSPHKSGQNQQT

SEQ ID NO: 1787 - protein, 18 aa, synthetic construct
KTINGHDSPHKSGRRRQT

SEQ ID NO: 1788 - protein, 18 aa, synthetic construct
KISNGHDSPHKSAQNQQT

SEQ ID NO: 1789 - protein, 18 aa, synthetic construct
KTGNGHDSPHKSGQYQQT

SEQ ID NO: 1790 - protein, 18 aa, synthetic construct
KTINGHYSPHLFGQNQQT

SEQ ID NO: 1791 - protein, 18 aa, synthetic construct
KTINGNYSPHKIGQNQQT

SEQ ID NO: 1792 - protein, 18 aa, synthetic construct
KTINGHDSPHKSRQNDQT

SEQ ID NO: 1793 - protein, 18 aa, synthetic construct
KQQQGHDSPHKSGQNQQT

SEQ ID NO: 1794 - protein, 18 aa, synthetic construct
KTPQDHDSPHKSGQNQQT

SEQ ID NO: 1795 - protein, 18 aa, synthetic construct
KHDWGHDSPHKSGQNQQT

SEQ ID NO: 1796 - protein, 18 aa, synthetic construct
KIEGGHDSPHKSGQNQQT

SEQ ID NO: 1797-1799 - skipped (3 entries)

SEQ ID NO: 1800 - protein, 13 aa, synthetic construct
GHDSPHKSGQNQQ

SEQ ID NO: 1801 - protein, 13 aa, synthetic construct
GSGSPHSKAQNQQ

SEQ ID NO: 1802 - protein, 13 aa, synthetic construct
GSGSPHSKAQNRH

SEQ ID NO: 1803 - protein, 13 aa, synthetic construct
GSGSPHSKVQNQQ

SEQ ID NO: 1804 - protein, 13 aa, synthetic construct
MSGSPHSKAQNQQ

SEQ ID NO: 1805 - protein, 13 aa, synthetic construct
GRGSPHSKAQNQQ

SEQ ID NO: 1806 - protein, 13 aa, synthetic construct
RNGSPHSKAQNQQ

SEQ ID NO: 1807 - protein, 13 aa, synthetic construct
GSGSPHSKARDQQ

SEQ ID NO: 1808 - protein, 13 aa, synthetic construct
GSGSPHSKAPNLQ

SEQ ID NO: 1809 - DNA, 3941 bp, synthetic construct
  source 1..3941: mol_type = other DNA
ctgcgcgctcgctcgctcactgaggccgcccgggcaaagcccgggcgtcgggcgacctttggtcgcccggcctcagtgagcgagcgagcgcgcagagagggagtggccaactccatcactaggggttccttgtagttaatgattaacccgccatgctacttatctaccagggtaatggggatcctctagaactatagctagtcgacattgattattgactagttattaatagtaatcaattacggggtcattagttcatagcccatatatggagttccgcgttacataacttacggtaaatggcccgcctggctgaccgcccaacgacccccgcccattgacgtcaataatgacgtatgttcccatagtaacgccaatagggactttccattgacgtcaatgggtggagtatttacggtaaactgcccacttggcagtacatcaagtgtatcatatgccaagtacgccccctattgacgtcaatgacggtaaatggcccgcctggcattatgcccagtacatgaccttatgggactttcctacttggcagtacatctacgtattagtcatcgctattaccatgtcgaggccacgttctgcttcactctccccatctcccccccctccccacccccaattttgtatttatttattttttaattattttgtgcagcgatgggggcggggggggggggcgcgcgccaggcggggcggggcggggcgaggggcggggcggggcgaggcggagaggtgcggcggcagccaatcagagcggcgcgctccgaaagtttccttttatggcgaggcggcggcggcggcggccctataaaaagcgaagcgcgcggcgggcgggagcaagcttcgtttagtgaaccgtcagatcgcctggagacgccatccacgctgttttgacctccatagaagacaccgggaccgatccagcctccgcggattcgaatcccggccgggaacggtgcattggaacgcggattccccgtgccaagagtgacgtaagtaccgcctatagagtctataggcccacaaaaaatgctttcttcttttaatatacttttttgtttatcttatttctaatactttccctaatctctttctttcagggcaataatgatacaatgtatcatgcctctttgcaccattctaaagaataacagtgataatttctgggttaaggcaatagcaatatttctgcatataaatatttctgcatataaattgtaactgatgtaagaggtttcatattgctaatagcagctacaatccagctaccattctgcttttattttatggttgggataaggctggattattctgagtccaagctaggcccttttgctaatcatgttcatacctcttatcttcctcccacagctcctgggcaacgtgctggtctgtgtgctggcccatcactttggcaaagaattgggattcgaaccggtgccgccaccatggaattcagcagccccagcagagaggaatgccccaagcctctgagccgggtgtcaatcatggccggatctctgacaggactgctgctgcttcaggccgtgtcttgggcttctggcatgaaggagaccgctgctgcaaagttcgagagacagcatatggatagctccacaagcgccgcagctagaccttgcatccccaagagcttcggctacagcagcgtcgtgtgcgtgtgcaatgccacctactgcgacagcttcgaccctcctacctttcctgctctgggcaccttcagcagatacgagagcaccagatccggcagacggatggaactgagcatgggacccatccaggccaatcacacaggcactggcctgctgctgacactgcagcctgagcagaaattccagaaagtgaaaggcttcggcggagccatgacagatgccgccgctctgaatatcctggctctgtctccaccagctcagaacctgctgctcaagagctacttcagcgaggaaggcatcggctacaacatcatcagagtgcccatggccagctgcgacttcagcatcaggacctacacctacgccgacacacccgacgatttccagctgcacaacttcagcctgcctgaagaggacaccaagctgaagatccctctgatccacagagccctgcagctggcacaaagacccgtgtcactgctggcctctccatggacatctcccacctggctgaaaacaaatggcgccgtgaatggcaagggcagcctgaaaggccaacctggcgacatctaccaccagacctgggccagatacttcgtgaagttcctggacgcctatgccgagcacaagctgcagttttgggccgtgacagccgagaacgaaccttctgctggactgctgagcggctacccctttcagtgcctgggctttacacccgagcaccagcgggactttatcgcccgtgatctgggacccacactggccaatagcacccaccataatgtgcggctgctgatgctggacgaccagagactgcttctgccccactgggctaaagtggtgctgacagatcctgaggccgccaaatacgtgcacggaatcgccgtgcactggtatctggactttctggcccctgccaaggccacactgggagagacacacagactgttccccaacaccatgctgttcgccagcgaagcctgtgtgggcagcaagttttgggaacagagcgtgcggctcggcagctgggatagaggcatgcagtacagccacagcatcatcaccaacctgctgtaccacgtcgtcggctggaccgactggaatctggccctgaatcctgaaggcggccctaactgggtccgaaacttcgtggacagccccatcatcgtggacatcaccaaggacaccttctacaagcagcccatgttctaccacctgggacacttcagcaagttcatccccgagggctctcagcgcgttggactggtggcttcccagaagaacgatctggacgccgtggctctgatgcaccctgatggatctgctgtggtggtggtcctgaaccgcagcagcaaagatgtgcccctgaccatcaaggatcccgccgtgggattcctggaaacaatcagccctggctactccatccacacctacctgtggcgtagacagagaaagaggcgagagggcagaggaagtcttctaacatgcggtgacgtggaggagaatcccggccctatgtacgccctcttcctcctggccagcctcctgggcgcggctctagccgtgaaagagatgcccatgcagactctggtccccgccaaagtggcctccaagaatgtcatccctgccctggaactggtggagcccattaagaagcacgaggtcccagcaaagtctgatgtttactgtgaggtgtgtgaattcctggtgaaggaggtgaccaagctgattgacaacaacaagactgagaaagaaatactcgacgcttttgacaaaatgtgctcgaagctgccgaagtccctgtcggaagagtgccaggaggtggtggacacgtacggcagctccatcctgtccatcctgctggaggaggtcagccctgagctggtgtgcagcatgctgcacctctgctctggctagtaactcgaggacggggtgaactacgcctgaggatccgatctttttccctctgccaaaaattatggggacatcatgaagccccttgagcatctgacttctggctaataaaggaaatttattttcattgcaatagtgtgttggaattttttgtgtctctcactcggcctaggtagataagtagcatggcgggttaatcattaactacaaggaacccctagtgatggagttggccactccctctctgcgcgctcgctcgctcactgaggccgggcgaccaaaggtcgcccgacgcccgggctttgcccgggcggcctcagtgagcgagcgagcgcgcag

SEQ ID NO: 1810 - DNA, 3977 bp, synthetic construct
  source 1..3977: mol_type = other DNA
ctgcgcgctcgctcgctcactgaggccgcccgggcaaagcccgggcgtcgggcgacctttggtcgcccggcctcagtgagcgagcgagcgcgcagagagggagtggccaactccatcactaggggttccttgtagttaatgattaacccgccatgctacttatctaccagggtaatggggatcctctagaactatagctagtcgacattgattattgactagttattaatagtaatcaattacggggtcattagttcatagcccatatatggagttccgcgttacataacttacggtaaatggcccgcctggctgaccgcccaacgacccccgcccattgacgtcaataatgacgtatgttcccatagtaacgccaatagggactttccattgacgtcaatgggtggagtatttacggtaaactgcccacttggcagtacatcaagtgtatcatatgccaagtacgccccctattgacgtcaatgacggtaaatggcccgcctggcattatgcccagtacatgaccttatgggactttcctacttggcagtacatctacgtattagtcatcgctattaccatgtcgaggccacgttctgcttcactctccccatctcccccccctccccacccccaattttgtatttatttattttttaattattttgtgcagcgatgggggcggggggggggggcgcgcgccaggcggggcggggcggggcgaggggcggggcggggcgaggcggagaggtgcggcggcagccaatcagagcggcgcgctccgaaagtttccttttatggcgaggcggcggcggcggcggccctataaaaagcgaagcgcgcggcgggcgggagcaagcttcgtttagtgaaccgtcagatcgcctggagacgccatccacgctgttttgacctccatagaagacaccgggaccgatccagcctccgcggattcgaatcccggccgggaacggtgcattggaacgcggattccccgtgccaagagtgacgtaagtaccgcctatagagtctataggcccacaaaaaatgctttcttcttttaatatacttttttgtttatcttatttctaatactttccctaatctctttctttcagggcaataatgatacaatgtatcatgcctctttgcaccattctaaagaataacagtgataatttctgggttaaggcaatagcaatatttctgcatataaatatttctgcatataaattgtaactgatgtaagaggtttcatattgctaatagcagctacaatccagctaccattctgcttttattttatggttgggataaggctggattattctgagtccaagctaggcccttttgctaatcatgttcatacctcttatcttcctcccacagctcctgggcaacgtgctggtctgtgtgctggcccatcactttggcaaagaattgggattcgaaccggtgccgccaccatggaattcagcagccccagcagagaggaatgccccaagcctctgagccgggtgtcaatcatggccggatctctgacaggactgctgctgcttcaggccgtgtcttgggcttctggcgctagaccttgcatccccaagagcttcggctacagcagcgtcgtgtgcgtgtgcaatgccacctactgcgacagcttcgaccctcctacctttcctgctctgggcaccttcagcagatacgagagcaccagatccggcagacggatggaactgagcatgggacccatccaggccaatcacacaggcactggcctgctgctgacactgcagcctgagcagaaattccagaaagtgaaaggcttcggcggagccatgacagatgccgccgctctgaatatcctggctctgtctccaccagctcagaacctgctgctcaagagctacttcagcgaggaaggcatcggctacaacatcatcagagtgcccatggccagctgcgacttcagcatcaggacctacacctacgccgacacacccgacgatttccagctgcacaacttcagcctgcctgaagaggacaccaagctgaagatccctctgatccacagagccctgcagctggcacaaagacccgtgtcactgctggcctctccatggacatctcccacctggctgaaaacaaatggcgccgtgaatggcaagggcagcctgaaaggccaacctggcgacatctaccaccagacctgggccagatacttcgtgaagttcctggacgcctatgccgagcacaagctgcagttttgggccgtgacagccgagaacgaaccttctgctggactgctgagcggctacccctttcagtgcctgggctttacacccgagcaccagcgggactttatcgcccgtgatctgggacccacactggccaatagcacccaccataatgtgcggctgctgatgctggacgaccagagactgcttctgccccactgggctaaagtggtgctgacagatcctgaggccgccaaatacgtgcacggaatcgccgtgcactggtatctggactttctggcccctgccaaggccacactgggagagacacacagactgttccccaacaccatgctgttcgccagcgaagcctgtgtgggcagcaagttttgggaacagagcgtgcggctcggcagctgggatagaggcatgcagtacagccacagcatcatcaccaacctgctgtaccacgtcgtcggctggaccgactggaatctggccctgaatcctgaaggcggccctaactgggtccgaaacttcgtggacagccccatcatcgtggacatcaccaaggacaccttctacaagcagcccatgttctaccacctgggacacttcagcaagttcatccccgagggctctcagcgcgttggactggtggcttcccagaagaacgatctggacgccgtggctctgatgcaccctgatggatctgctgtggtggtggtcctgaaccgcagcagcaaagatgtgcccctgaccatcaaggatcccgccgtgggattcctggaaacaatcagccctggctactccatccacacctacctgtggcgtagacagggaggggggggttcgggtggcggcggaagtgggggcggtggttctctacggaagctgcggaagcggctactgctgcggaaacttcggaaacggctactgagaaagaggcgagagggcagaggaagtcttctaacatgcggtgacgtggaggagaatcccggccctatgtacgccctcttcctcctggccagcctcctgggcgcggctctagccgtgaaagagatgcccatgcagactctggtccccgccaaagtggcctccaagaatgtcatccctgccctggaactggtggagcccattaagaagcacgaggtcccagcaaagtctgatgtttactgtgaggtgtgtgaattcctggtgaaggaggtgaccaagctgattgacaacaacaagactgagaaagaaatactcgacgcttttgacaaaatgtgctcgaagctgccgaagtccctgtcggaagagtgccaggaggtggtggacacgtacggcagctccatcctgtccatcctgctggaggaggtcagccctgagctggtgtgcagcatgctgcacctctgctctggctagtaactcgaggacggggtgaactacgcctgaggatccgatctttttccctctgccaaaaattatggggacatcatgaagccccttgagcatctgacttctggctaataaaggaaatttattttcattgcaatagtgtgttggaattttttgtgtctctcactcggcctaggtagataagtagcatggcgggttaatcattaactacaaggaacccctagtgatggagttggccactccctctctgcgcgctcgctcgctcactgaggccgggcgaccaaaggtcgcccgacgcccgggctttgcccgggcggcctcagtgagcgagcgagcgcgcag

SEQ ID NO: 1811 - DNA, 4040 bp, synthetic construct
  source 1..4040: mol_type = other DNA
ctgcgcgctcgctcgctcactgaggccgcccgggcaaagcccgggcgtcgggcgacctttggtcgcccggcctcagtgagcgagcgagcgcgcagagagggagtggccaactccatcactaggggttccttgtagttaatgattaacccgccatgctacttatctaccagggtaatggggatcctctagaactatagctagtcgacattgattattgactagttattaatagtaatcaattacggggtcattagttcatagcccatatatggagttccgcgttacataacttacggtaaatggcccgcctggctgaccgcccaacgacccccgcccattgacgtcaataatgacgtatgttcccatagtaacgccaatagggactttccattgacgtcaatgggtggagtatttacggtaaactgcccacttggcagtacatcaagtgtatcatatgccaagtacgccccctattgacgtcaatgacggtaaatggcccgcctggcattatgcccagtacatgaccttatgggactttcctacttggcagtacatctacgtattagtcatcgctattaccatgtcgaggccacgttctgcttcactctccccatctcccccccctccccacccccaattttgtatttatttattttttaattattttgtgcagcgatgggggcggggggggggggcgcgcgccaggcggggcggggcggggcgaggggcggggcggggcgaggcggagaggtgcggcggcagccaatcagagcggcgcgctccgaaagtttccttttatggcgaggcggcggcggcggcggccctataaaaagcgaagcgcgcggcgggcgggagcaagcttcgtttagtgaaccgtcagatcgcctggagacgccatccacgctgttttgacctccatagaagacaccgggaccgatccagcctccgcggattcgaatcccggccgggaacggtgcattggaacgcggattccccgtgccaagagtgacgtaagtaccgcctatagagtctataggcccacaaaaaatgctttcttcttttaatatacttttttgtttatcttatttctaatactttccctaatctctttctttcagggcaataatgatacaatgtatcatgcctctttgcaccattctaaagaataacagtgataatttctgggttaaggcaatagcaatatttctgcatataaatatttctgcatataaattgtaactgatgtaagaggtttcatattgctaatagcagctacaatccagctaccattctgcttttattttatggttgggataaggctggattattctgagtccaagctaggcccttttgctaatcatgttcatacctcttatcttcctcccacagctcctgggcaacgtgctggtctgtgtgctggcccatcactttggcaaagaattgggattcgaaccggtgccgccaccatggaattcagcagccccagcagagaggaatgccccaagcctctgagccgggtgtcaatcatggccggatctctgacaggactgctgctgcttcaggccgtgtcttgggcttctggcatgaaggagaccgctgctgcaaagttcgagagacagcatatggatagctccacaagcgccgcagctagaccttgcatccccaagagcttcggctacagcagcgtcgtgtgcgtgtgcaatgccacctactgcgacagcttcgaccctcctacctttcctgctctgggcaccttcagcagatacgagagcaccagatccggcagacggatggaactgagcatgggacccatccaggccaatcacacaggcactggcctgctgctgacactgcagcctgagcagaaattccagaaagtgaaaggcttcggcggagccatgacagatgccgccgctctgaatatcctggctctgtctccaccagctcagaacctgctgctcaagagctacttcagcgaggaaggcatcggctacaacatcatcagagtgcccatggccagctgcgacttcagcatcaggacctacacctacgccgacacacccgacgatttccagctgcacaacttcagcctgcctgaagaggacaccaagctgaagatccctctgatccacagagccctgcagctggcacaaagacccgtgtcactgctggcctctccatggacatctcccacctggctgaaaacaaatggcgccgtgaatggcaagggcagcctgaaaggccaacctggcgacatctaccaccagacctgggccagatacttcgtgaagttcctggacgcctatgccgagcacaagctgcagttttgggccgtgacagccgagaacgaaccttctgctggactgctgagcggctacccctttcagtgcctgggctttacacccgagcaccagcgggactttatcgcccgtgatctgggacccacactggccaatagcacccaccataatgtgcggctgctgatgctggacgaccagagactgcttctgccccactgggctaaagtggtgctgacagatcctgaggccgccaaatacgtgcacggaatcgccgtgcactggtatctggactttctggcccctgccaaggccacactgggagagacacacagactgttccccaacaccatgctgttcgccagcgaagcctgtgtgggcagcaagttttgggaacagagcgtgcggctcggcagctgggatagaggcatgcagtacagccacagcatcatcaccaacctgctgtaccacgtcgtcggctggaccgactggaatctggccctgaatcctgaaggcggccctaactgggtccgaaacttcgtggacagccccatcatcgtggacatcaccaaggacaccttctacaagcagcccatgttctaccacctgggacacttcagcaagttcatccccgagggctctcagcgcgttggactggtggcttcccagaagaacgatctggacgccgtggctctgatgcaccctgatggatctgctgtggtggtggtcctgaaccgcagcagcaaagatgtgcccctgaccatcaaggatcccgccgtgggattcctggaaacaatcagccctggctactccatccacacctacctgtggcgtagacagggaggggggggttcgggtggcggcggaagtgggggcggtggttctctacggaagctgcggaagcggctactgctgcggaaacttcggaaacggctactgagaaagaggcgagagggcagaggaagtcttctaacatgcggtgacgtggaggagaatcccggccctatgtacgccctcttcctcctggccagcctcctgggcgcggctctagccgtgaaagagatgcccatgcagactctggtccccgccaaagtggcctccaagaatgtcatccctgccctggaactggtggagcccattaagaagcacgaggtcccagcaaagtctgatgtttactgtgaggtgtgtgaattcctggtgaaggaggtgaccaagctgattgacaacaacaagactgagaaagaaatactcgacgcttttgacaaaatgtgctcgaagctgccgaagtccctgtcggaagagtgccaggaggtggtggacacgtacggcagctccatcctgtccatcctgctggaggaggtcagccctgagctggtgtgcagcatgctgcacctctgctctggctagtaactcgaggacggggtgaactacgcctgaggatccgatctttttccctctgccaaaaattatggggacatcatgaagccccttgagcatctgacttctggctaataaaggaaatttattttcattgcaatagtgtgttggaattttttgtgtctctcactcggcctaggtagataagtagcatggcgggttaatcattaactacaaggaacccctagtgatggagttggccactccctctctgcgcgctcgctcgctcactgaggccgggcgaccaaaggtcgcccgacgcccgggctttgcccgggcggcctcagtgagcgagcgagcgcgcag

SEQ ID NO: 1812 - DNA, 3413 bp, synthetic construct
  source 1..3413: mol_type = other DNA
ctgcgcgctcgctcgctcactgaggccgcccgggcaaagcccgggcgtcgggcgacctttggtcgcccggcctcagtgagcgagcgagcgcgcagagagggagtggccaactccatcactaggggttccttgtagttaatgattaacccgccatgctacttatctaccagggtaatggggatcctctagaactatagctagtcgacattgattattgactagttattaatagtaatcaattacggggtcattagttcatagcccatatatggagttccgcgttacataacttacggtaaatggcccgcctggctgaccgcccaacgacccccgcccattgacgtcaataatgacgtatgttcccatagtaacgccaatagggactttccattgacgtcaatgggtggagtatttacggtaaactgcccacttggcagtacatcaagtgtatcatatgccaagtacgccccctattgacgtcaatgacggtaaatggcccgcctggcattatgcccagtacatgaccttatgggactttcctacttggcagtacatctacgtattagtcatcgctattaccatgtcgaggccacgttctgcttcactctccccatctcccccccctccccacccccaattttgtatttatttattttttaattattttgtgcagcgatgggggcggggggggggggcgcgcgccaggcggggcggggcggggcgaggggcggggcggggcgaggcggagaggtgcggcggcagccaatcagagcggcgcgctccgaaagtttccttttatggcgaggcggcggcggcggcggccctataaaaagcgaagcgcgcggcgggcgggagcaagcttcgtttagtgaaccgtcagatcgcctggagacgccatccacgctgttttgacctccatagaagacaccgggaccgatccagcctccgcggattcgaatcccggccgggaacggtgcattggaacgcggattccccgtgccaagagtgacgtaagtaccgcctatagagtctataggcccacaaaaaatgctttcttcttttaatatacttttttgtttatcttatttctaatactttccctaatctctttctttcagggcaataatgatacaatgtatcatgcctctttgcaccattctaaagaataacagtgataatttctgggttaaggcaatagcaatatttctgcatataaatatttctgcatataaattgtaactgatgtaagaggtttcatattgctaatagcagctacaatccagctaccattctgcttttattttatggttgggataaggctggattattctgagtccaagctaggcccttttgctaatcatgttcatacctcttatcttcctcccacagctcctgggcaacgtgctggtctgtgtgctggcccatcactttggcaaagaattgggattcgaaccggtgccgccaccatggaattctctagcccatctagagaggaatgtcctaagcctctgtcaagagtgtccatcatggccggcagcctgacaggcctgctgctgctgcaggccgtgtcctgggccagtggagcccggccctgcatccctaagtccttcggctattctagcgtggtctgcgtgtgtaatgccacttactgcgacagcttcgaccctcctaccttccccgcccttggaacattcagcagatacgagagcaccagaagcggcagaagaatggaactgagcatgggcccaatccaggccaaccacaccggcaccggcctgctgctgacactgcaacctgagcagaagttccagaaggtgaagggatttggaggcgccatgaccgacgctgctgctctgaacatcctggccctctccccacctgctcagaacctgctgcttaaaagctacttcagcgaggaaggcatcggctataacatcatcagagtgcccatggccagctgcgacttcagcatcagaacatacacctacgccgatacacctgatgacttccaactgcacaacttcagcctgcctgaagaggacacaaagctgaaaatccccctgatccaccgggccctgcagctggcccagagacctgtgagcctgctggcctctccttggacaagccccacctggctgaagaccaatggagctgtgaacggcaagggcagcctgaagggccagcccggcgacatctaccaccaaacctgggctcgctacttcgtgaaattcctggacgcctacgctgagcataagctgcaattttgggccgttacagccgagaacgagccttctgccggcctgctgtctggatatcctttccagtgcctgggcttcacccctgagcaccagagagactttatcgccagagatctggggcctaccctggctaacagcacacaccacaacgtgcggctgctgatgctggacgatcagaggctgctgctcccccactgggccaaggtggtgctgacagatccggaggccgccaaatacgtgcacggcatcgccgtccactggtacctggatttcctggcccctgccaaggccaccctgggcgagacacatagactgtttcctaataccatgctgttcgccagcgaggcctgcgtgggcagcaagttctgggaacagagcgtgcggctgggcagctgggacagaggaatgcagtacagccacagcatcattaccaacctgctgtaccacgtggtgggctggaccgactggaacctggccctgaaccccgaaggcggccccaactgggtgcggaacttcgtggactctcctatcatcgtggatattaccaaggataccttttacaagcagcctatgttctaccacctgggccacttcagcaagttcatccctgagggctctcagcgggtgggcctggtggcctctcagaaaaacgacctggatgccgttgccctgatgcaccccgacggcagcgccgtggtggtcgtcctgaatagaagctccaaggacgtgcctctgaccatcaaggaccccgctgtgggatttctggaaaccatcagccctggctacagcatccacacctacctgtggcggcggcagtagtaactcgaggacggggtgaactacgcctgaggatccgatctttttccctctgccaaaaattatggggacatcatgaagccccttgagcatctgacttctggctaataaaggaaatttattttcattgcaatagtgtgttggaattttttgtgtctctcactcggcctaggtagataagtagcatggcgggttaatcattaactacaaggaacccctagtgatggagttggccactccctctctgcgcgctcgctcgctcactgaggccgggcgaccaaaggtcgcccgacgcccgggctttgcccgggcggcctcagtgagcgagcgagcgcgcag

SEQ ID NO: 1813 - DNA, 3375 bp, synthetic construct
  source 1..3375: mol_type = other DNA
ctgcgcgctcgctcgctcactgaggccgcccgggcaaagcccgggcgtcgggcgacctttggtcgcccggcctcagtgagcgagcgagcgcgcagagagggagtggccaactccatcactaggggttccttgtagttaatgattaacccgccatgctacttatctaccagggtaatggggatcctctagaactatagctagtcgacataacgcgtgcatgcgtgaggctccggtgcccgtcagtgggcagagcgcacatcgcccacagtccccgagaagttggggggaggggtcggcaattgaaccggtgcctagagaaggtggcgcggggtaaactgggaaagtgatgtcgtgtactggctccgcctttttcccgagggtgggggagaaccgtatataagtgcagtagtcgccgtgaacgttctttttcgcaacgggtttgccgccagaacacaggtaagtgccgtgtgtggttcccgcgggcctggcctctttacgggttatggcccttgcgtgccttgaattacttccacctggctgcagtacgtgattcttgatcccgagcttcgggttggaagtgggtgggagagttcgaggccttgcgcttaaggagccccttcgcctcgtgcttgagttgaggcctggcctgggcgctggggccgccgcgtgcgaatctggtggcaccttcgcgcctgtctcgctgctttcgataagtctctagccatttaaaatttttgatgacctgctgcgacgctttttttctggcaagatagtcttgtaaatgcgggccaagatctgcacactggtatttcggtttttggggccgcgggcggcgacggggcccgtgcgtcccagcgcacatgttcggcgaggcggggcctgcgagcgcggccaccgagaatcggacgggggtagtctcaagctggccggcctgctctggtgcctggcctcgcgccgccgtgtatcgccccgccctgggcggcaaggctggcccggtcggcaccagttgcgtgagcggaaagatggccgcttcccggccctgctgcagggagctcaaaatggaggacgcggcgctcgggagagcgggcgggtgagtcacccacacaaaggaaaagggcctttccgtcctcagccgtcgcttcatgtgactccacggagtaccgggcgccgtccaggcacctcgattagttctcgagcttttggagtacgtcgtctttaggttggggggaggggttttatgcgatggagtttccccacactgagtgggtggagactgaagttaggccagcttggcacttgatgtaattctccttggaatttgccctttttgagtttggatcttggttcattctcaagcctcagacagtggttcaaagtttttttcttccatttcaggtgtcgtgagggattcgaaccggtgccgccaccatggaattctctagcccatctagagaggaatgtcctaagcctctgtcaagagtgtccatcatggccggcagcctgacaggcctgctgctgctgcaggccgtgtcctgggccagtggagcccggccctgcatccctaagtccttcggctattctagcgtggtctgcgtgtgtaatgccacttactgcgacagcttcgaccctcctaccttccccgcccttggaacattcagcagatacgagagcaccagaagcggcagaagaatggaactgagcatgggcccaatccaggccaaccacaccggcaccggcctgctgctgacactgcaacctgagcagaagttccagaaggtgaagggatttggaggcgccatgaccgacgctgctgctctgaacatcctggccctctccccacctgctcagaacctgctgcttaaaagctacttcagcgaggaaggcatcggctataacatcatcagagtgcccatggccagctgcgacttcagcatcagaacatacacctacgccgatacacctgatgacttccaactgcacaacttcagcctgcctgaagaggacacaaagctgaaaatccccctgatccaccgggccctgcagctggcccagagacctgtgagcctgctggcctctccttggacaagccccacctggctgaagaccaatggagctgtgaacggcaagggcagcctgaagggccagcccggcgacatctaccaccaaacctgggctcgctacttcgtgaaattcctggacgcctacgctgagcataagctgcaattttgggccgttacagccgagaacgagccttctgccggcctgctgtctggatatcctttccagtgcctgggcttcacccctgagcaccagagagactttatcgccagagatctggggcctaccctggctaacagcacacaccacaacgtgcggctgctgatgctggacgatcagaggctgctgctcccccactgggccaaggtggtgctgacagatccggaggccgccaaatacgtgcacggcatcgccgtccactggtacctggatttcctggcccctgccaaggccaccctgggcgagacacatagactgtttcctaataccatgctgttcgccagcgaggcctgcgtgggcagcaagttctgggaacagagcgtgcggctgggcagctgggacagaggaatgcagtacagccacagcatcattaccaacctgctgtaccacgtggtgggctggaccgactggaacctggccctgaaccccgaaggcggccccaactgggtgcggaacttcgtggactctcctatcatcgtggatattaccaaggataccttttacaagcagcctatgttctaccacctgggccacttcagcaagttcatccctgagggctctcagcgggtgggcctggtggcctctcagaaaaacgacctggatgccgttgccctgatgcaccccgacggcagcgccgtggtggtcgtcctgaatagaagctccaaggacgtgcctctgaccatcaaggaccccgctgtgggatttctggaaaccatcagccctggctacagcatccacacctacctgtggcggcggcagtagtaactcgaggacggggtgaactacgcctgaggatccgatctttttccctctgccaaaaattatggggacatcatgaagccccttgagcatctgacttctggctaataaaggaaatttattttcattgcaatagtgtgttggaattttttgtgtctctcactcggcctaggtagataagtagcatggcgggttaatcattaactacaaggaacccctagtgatggagttggccactccctctctgcgcgctcgctcgctcactgaggccgggcgaccaaaggtcgcccgacgcccgggctttgcccgggcggcctcagtgagcgagcgagcgcgcag

SEQ ID NO: 1814 - DNA, 3360 bp, synthetic construct
  source 1..3360: mol_type = other DNA
ctgcgcgctcgctcgctcactgaggccgcccgggcaaagcccgggcgtcgggcgacctttggtcgcccggcctcagtgagcgagcgagcgcgcagagagggagtggccaactccatcactaggggttccttgtagttaatgattaacccgccatgctacttatctaccagggtaatggggatcctctagaactatagctagtcgacataacgcgtgttgacattgattattgactagttattaatagtaatcaattacggggtcattagttcatagcccatatatggagttccgcgttacataacttacggtaaatggcccgcctggctgaccgcccaacgacccccgcccattgacgtcaataatgacgtatgttcccatagtaacgccaatagggactttccattgacgtcaatgggtggagtatttacggtaaactgcccacttggcagtacatcaagtgtatcatatgccaagtacgccccctattgacgtcaatgacggtaaatggcccgcctggcattatgcccagtacatgaccttatgggactttcctacttggcagtacatctacgtattagtcatcgctattaccatggtgatgcggttttggcagtacatcaatgggcgtggatagcggtttgactcacggggatttccaagtctccaccccattgacgtcaatgggagtttgttttggcaccaaaatcaacgggactttccaaaatgtcgtaacaactccgccccattgacgcaaatgggcggtaggcgtgtacggtgggaggtctatataagcagagctcaagcttcgtttagtgaaccgtcagatcgcctggagacgccatccacgctgttttgacctccatagaagacaccgggaccgatccagcctccgcggattcgaatcccggccgggaacggtgcattggaacgcggattccccgtgccaagagtgacgtaagtaccgcctatagagtctataggcccacaaaaaatgctttcttcttttaatatacttttttgtttatcttatttctaatactttccctaatctctttctttcagggcaataatgatacaatgtatcatgcctctttgcaccattctaaagaataacagtgataatttctgggttaaggcaatagcaatatttctgcatataaatatttctgcatataaattgtaactgatgtaagaggtttcatattgctaatagcagctacaatccagctaccattctgcttttattttatggttgggataaggctggattattctgagtccaagctaggcccttttgctaatcatgttcatacctcttatcttcctcccacagctcctgggcaacgtgctggtctgtgtgctggcccatcactttggcaaagaattgggattcgaaccggtgccgccaccatggaattctctagcccatctagagaggaatgtcctaagcctctgtcaagagtgtccatcatggccggcagcctgacaggcctgctgctgctgcaggccgtgtcctgggccagtggagcccggccctgcatccctaagtccttcggctattctagcgtggtctgcgtgtgtaatgccacttactgcgacagcttcgaccctcctaccttccccgcccttggaacattcagcagatacgagagcaccagaagcggcagaagaatggaactgagcatgggcccaatccaggccaaccacaccggcaccggcctgctgctgacactgcaacctgagcagaagttccagaaggtgaagggatttggaggcgccatgaccgacgctgctgctctgaacatcctggccctctccccacctgctcagaacctgctgcttaaaagctacttcagcgaggaaggcatcggctataacatcatcagagtgcccatggccagctgcgacttcagcatcagaacatacacctacgccgatacacctgatgacttccaactgcacaacttcagcctgcctgaagaggacacaaagctgaaaatccccctgatccaccgggccctgcagctggcccagagacctgtgagcctgctggcctctccttggacaagccccacctggctgaagaccaatggagctgtgaacggcaagggcagcctgaagggccagcccggcgacatctaccaccaaacctgggctcgctacttcgtgaaattcctggacgcctacgctgagcataagctgcaattttgggccgttacagccgagaacgagccttctgccggcctgctgtctggatatcctttccagtgcctgggcttcacccctgagcaccagagagactttatcgccagagatctggggcctaccctggctaacagcacacaccacaacgtgcggctgctgatgctggacgatcagaggctgctgctcccccactgggccaaggtggtgctgacagatccggaggccgccaaatacgtgcacggcatcgccgtccactggtacctggatttcctggcccctgccaaggccaccctgggcgagacacatagactgtttcctaataccatgctgttcgccagcgaggcctgcgtgggcagcaagttctgggaacagagcgtgcggctgggcagctgggacagaggaatgcagtacagccacagcatcattaccaacctgctgtaccacgtggtgggctggaccgactggaacctggccctgaaccccgaaggcggccccaactgggtgcggaacttcgtggactctcctatcatcgtggatattaccaaggataccttttacaagcagcctatgttctaccacctgggccacttcagcaagttcatccctgagggctctcagcgggtgggcctggtggcctctcagaaaaacgacctggatgccgttgccctgatgcaccccgacggcagcgccgtggtggtcgtcctgaatagaagctccaaggacgtgcctctgaccatcaaggaccccgctgtgggatttctggaaaccatcagccctggctacagcatccacacctacctgtggcggcggcagtagtaactcgaggacggggtgaactacgcctgaggatccgatctttttccctctgccaaaaattatggggacatcatgaagccccttgagcatctgacttctggctaataaaggaaatttattttcattgcaatagtgtgttggaattttttgtgtctctcactcggcctaggtagataagtagcatggcgggttaatcattaactacaaggaacccctagtgatggagttggccactccctctctgcgcgctcgctcgctcactgaggccgggcgaccaaaggtcgcccgacgcccgggctttgcccgggcggcctcagtgagcgagcgagcgcgcag

SEQ ID NO: 1815 - DNA, 3901 bp, synthetic construct
  source 1..3901: mol_type = other DNA
ctgcgcgctcgctcgctcactgaggccgcccgggcaaagcccgggcgtcgggcgacctttggtcgcccggcctcagtgagcgagcgagcgcgcagagagggagtggccaactccatcactaggggttccttgtagttaatgattaacccgccatgctacttatctaccagggtaatggggatcctctagaactatagctagtcgacataacgcgtctagttattaatagtaatcaattacggggtcattagttcatagcccatatatggagttccgcgttacataacttacggtaaatggcccgcctggctgaccgcccaacgacccccgcccattgacgtcaataatgacgtatgttcccatagtaacgccaatagggactttccattgacgtcaatgggtggagtatttacggtaaactgcccacttggcagtacatcaagtgtatcatatgccaagtacgccccctattgacgtcaatgacggtaaatggcccgcctggcattatgcccagtacatgaccttatgggactttcctacttggcagtacatctacgtattagtcatcgctattaccatggtcgaggtgagccccacgttctgcttcactctccccatctcccccccctccccacccccaattttgtatttatttattttttaattattttgtgcagcgatgggggcggggggggggggggggcgcgcgccaggcggggcggggcggggcgaggggcggggcggggcgaggcggagaggtgcggcggcagccaatcagagcggcgcgctccgaaagtttccttttatggcgaggcggcggcggcggcggccctataaaaagcgaagcgcgcggcgggcgggagtcgctgcgcgctgccttcgccccgtgccccgctccgccgccgcctcgcgccgcccgccccggctctgactgaccgcgttactcccacaggtgagcgggcgggacggcccttctcctccgggctgtaattagcgcttggtttaatgacggcttgtttcttttctgtggctgcgtgaaagccttgaggggctccgggagggccctttgtgcggggggagcggctcggggggtgcgtgcgtgtgtgtgtgcgtggggagcgccgcgtgcggctccgcgctgcccggcggctgtgagcgctgcgggcgcggcgcggggctttgtgcgctccgcagtgtgcgcgaggggagcgcggccgggggcggtgccccgcggtgcggggggggctgcgaggggaacaaaggctgcgtgcggggtgtgtgcgtgggggggtgagcagggggtgtgggcgcgtcggtcgggctgcaaccccccctgcacccccctccccgagttgctgagcacggcccggcttcgggtgcggggctccgtacggggcgtggcgcggggctcgccgtgccgggcggggggtggcggcaggtgggggtgccgggcggggcggggccgcctcgggccggggagggctcgggggaggggcgcggcggcccccggagcgccggcggctgtcgaggcgcggcgagccgcagccattgccttttatggtaatcgtgcgagagggcgcagggacttcctttgtcccaaatctgtgcggagccgaaatctgggaggcgccgccgcaccccctctagcgggcgcggggcgaagcggtgcggcgccggcaggaaggaaatgggcggggagggccttcgtgcgtcgccgcgccgccgtccccttctccctctccagcctcggggctgtccgcggggggacggctgccttcgggggggacggggcagggcggggttcggcttctggcgtgtgaccggcggctctagagcctctgctaaccatgttcatgccttcttctttttcctacagctcctgggcaacgtgctggttattgtgctgtctcatcattttggcaaagaattcgggattcgaaccggtgccgccaccatggaattctctagcccatctagagaggaatgtcctaagcctctgtcaagagtgtccatcatggccggcagcctgacaggcctgctgctgctgcaggccgtgtcctgggccagtggagcccggccctgcatccctaagtccttcggctattctagcgtggtctgcgtgtgtaatgccacttactgcgacagcttcgaccctcctaccttccccgcccttggaacattcagcagatacgagagcaccagaagcggcagaagaatggaactgagcatgggcccaatccaggccaaccacaccggcaccggcctgctgctgacactgcaacctgagcagaagttccagaaggtgaagggatttggaggcgccatgaccgacgctgctgctctgaacatcctggccctctccccacctgctcagaacctgctgcttaaaagctacttcagcgaggaaggcatcggctataacatcatcagagtgcccatggccagctgcgacttcagcatcagaacatacacctacgccgatacacctgatgacttccaactgcacaacttcagcctgcctgaagaggacacaaagctgaaaatccccctgatccaccgggccctgcagctggcccagagacctgtgagcctgctggcctctccttggacaagccccacctggctgaagaccaatggagctgtgaacggcaagggcagcctgaagggccagcccggcgacatctaccaccaaacctgggctcgctacttcgtgaaattcctggacgcctacgctgagcataagctgcaattttgggccgttacagccgagaacgagccttctgccggcctgctgtctggatatcctttccagtgcctgggcttcacccctgagcaccagagagactttatcgccagagatctggggcctaccctggctaacagcacacaccacaacgtgcggctgctgatgctggacgatcagaggctgctgctcccccactgggccaaggtggtgctgacagatccggaggccgccaaatacgtgcacggcatcgccgtccactggtacctggatttcctggcccctgccaaggccaccctgggcgagacacatagactgtttcctaataccatgctgttcgccagcgaggcctgcgtgggcagcaagttctgggaacagagcgtgcggctgggcagctgggacagaggaatgcagtacagccacagcatcattaccaacctgctgtaccacgtggtgggctggaccgactggaacctggccctgaaccccgaaggcggccccaactgggtgcggaacttcgtggactctcctatcatcgtggatattaccaaggataccttttacaagcagcctatgttctaccacctgggccacttcagcaagttcatccctgagggctctcagcgggtgggcctggtggcctctcagaaaaacgacctggatgccgttgccctgatgcaccccgacggcagcgccgtggtggtcgtcctgaatagaagctccaaggacgtgcctctgaccatcaaggaccccgctgtgggatttctggaaaccatcagccctggctacagcatccacacctacctgtggcggcggcagtagtaactcgaggacggggtgaactacgcctgaggatccgatctttttccctctgccaaaaattatggggacatcatgaagccccttgagcatctgacttctggctaataaaggaaatttattttcattgcaatagtgtgttggaattttttgtgtctctcactcggcctaggtagataagtagcatggcgggttaatcattaactacaaggaacccctagtgatggagttggccactccctctctgcgcgctcgctcgctcactgaggccgggcgaccaaaggtcgcccgacgcccgggctttgcccgggcggcctcagtgagcgagcgagcgcgcag

SEQ ID NO: 1816 - DNA, 3413 bp, synthetic construct
  source 1..3413: mol_type = other DNA
ctgcgcgctcgctcgctcactgaggccgcccgggcaaagcccgggcgtcgggcgacctttggtcgcccggcctcagtgagcgagcgagcgcgcagagagggagtggccaactccatcactaggggttccttgtagttaatgattaacccgccatgctacttatctaccagggtaatggggatcctctagaactatagctagtcgacattgattattgactagttattaatagtaatcaattacggggtcattagttcatagcccatatatggagttccgcgttacataacttacggtaaatggcccgcctggctgaccgcccaacgacccccgcccattgacgtcaataatgacgtatgttcccatagtaacgccaatagggactttccattgacgtcaatgggtggagtatttacggtaaactgcccacttggcagtacatcaagtgtatcatatgccaagtacgccccctattgacgtcaatgacggtaaatggcccgcctggcattatgcccagtacatgaccttatgggactttcctacttggcagtacatctacgtattagtcatcgctattaccatgtcgaggccacgttctgcttcactctccccatctcccccccctccccacccccaattttgtatttatttattttttaattattttgtgcagcgatgggggcggggggggggggcgcgcgccaggcggggcggggcggggcgaggggcggggcggggcgaggcggagaggtgcggcggcagccaatcagagcggcgcgctccgaaagtttccttttatggcgaggcggcggcggcggcggccctataaaaagcgaagcgcgcggcgggcgggagcaagcttcgtttagtgaaccgtcagatcgcctggagacgccatccacgctgttttgacctccatagaagacaccgggaccgatccagcctccgcggattcgaatcccggccgggaacggtgcattggaacgcggattccccgtgccaagagtgacgtaagtaccgcctatagagtctataggcccacaaaaaatgctttcttcttttaatatacttttttgtttatcttatttctaatactttccctaatctctttctttcagggcaataatgatacaatgtatcatgcctctttgcaccattctaaagaataacagtgataatttctgggttaaggcaatagcaatatttctgcatataaatatttctgcatataaattgtaactgatgtaagaggtttcatattgctaatagcagctacaatccagctaccattctgcttttattttatggttgggataaggctggattattctgagtccaagctaggcccttttgctaatcatgttcatacctcttatcttcctcccacagctcctgggcaacgtgctggtctgtgtgctggcccatcactttggcaaagaattgggattcgaaccggtgccgccaccatggagttttcaagtccttccagagaggaatgtcccaagcctttgagtagggtaagcatcatggctggcagcctcacaggattgcttctacttcaggcagtgtcgtgggcatcaggtgcccgcccctgcatccctaaaagcttcggctacagctcggtggtgtgtgtctgcaatgccacatactgtgactcctttgaccccccgacctttcctgcccttggtaccttcagccgctatgagagtacacgcagtgggcgacggatggagctgagtatggggcccatccaggctaatcacacgggcacaggcctgctactgaccctgcagccagaacagaagttccagaaagtgaagggatttggaggggccatgacagatgctgctgctctcaacatccttgccctgtcaccccctgcccaaaatttgctacttaaatcgtacttctctgaagaaggaatcggatataacatcatccgggtacccatggccagctgtgacttctccatccgcacctacacctatgcagacacccctgatgatttccagttgcacaacttcagcctcccagaggaagataccaagctcaagatacccctgattcaccgagccctgcagttggcccagcgtcccgtttcactccttgccagcccctggacatcacccacttggctcaagaccaatggagcggtgaatgggaaggggtcactcaagggacagcccggagacatctaccaccagacctgggccagatactttgtgaagttcctggatgcctatgctgagcacaagttacagttctgggcagtgacagctgaaaatgagccttctgctgggctgttgagtggataccccttccagtgcctgggcttcacccctgaacatcagcgagacttcattgcccgtgacctaggtcctaccctcgccaacagtactcaccacaatgtccgcctactcatgctggatgaccaacgcttgctgctgccccactgggcaaaggtggtactgacagacccagaagcagctaaatatgttcatggcattgctgtacattggtacctggactttctggctccagccaaagccaccctaggggagacacaccgcctgttccccaacaccatgctctttgcctcagaggcctgtgtgggctccaagttctgggagcagagtgtgcggctaggctcctgggatcgagggatgcagtacagccacagcatcatcacgaacctcctgtaccatgtggtcggctggaccgactggaaccttgccctgaaccccgaaggaggacccaattgggtgcgtaactttgtcgacagtcccatcattgtagacatcaccaaggacacgttttacaaacagcccatgttctaccaccttggccacttcagcaagttcattcctgagggctcccagagagtggggctggttgccagtcagaagaacgacctggacgcagtggcactgatgcatcccgatggctctgctgttgtggtcgtgctaaaccgctcctctaaggatgtgcctcttaccatcaaggatcctgctgtgggcttcctggagacaatctcacctggctactccattcacacctacctgtggcgtcgccagtagtaactcgaggacggggtgaactacgcctgaggatccgatctttttccctctgccaaaaattatggggacatcatgaagccccttgagcatctgacttctggctaataaaggaaatttattttcattgcaatagtgtgttggaattttttgtgtctctcactcggcctaggtagataagtagcatggcgggttaatcattaactacaaggaacccctagtgatggagttggccactccctctctgcgcgctcgctcgctcactgaggccgggcgaccaaaggtcgcccgacgcccgggctttgcccgggcggcctcagtgagcgagcgagcgcgcag

SEQ ID NO: 1817 - DNA, 3878 bp, synthetic construct
  source 1..3878: mol_type = other DNA
ctgcgcgctcgctcgctcactgaggccgcccgggcaaagcccgggcgtcgggcgacctttggtcgcccggcctcagtgagcgagcgagcgcgcagagagggagtggccaactccatcactaggggttccttgtagttaatgattaacccgccatgctacttatctaccagggtaatggggatcctctagaactatagctagtcgacattgattattgactagttattaatagtaatcaattacggggtcattagttcatagcccatatatggagttccgcgttacataacttacggtaaatggcccgcctggctgaccgcccaacgacccccgcccattgacgtcaataatgacgtatgttcccatagtaacgccaatagggactttccattgacgtcaatgggtggagtatttacggtaaactgcccacttggcagtacatcaagtgtatcatatgccaagtacgccccctattgacgtcaatgacggtaaatggcccgcctggcattatgcccagtacatgaccttatgggactttcctacttggcagtacatctacgtattagtcatcgctattaccatgtcgaggccacgttctgcttcactctccccatctcccccccctccccacccccaattttgtatttatttattttttaattattttgtgcagcgatgggggcggggggggggggcgcgcgccaggcggggcggggcggggcgaggggcggggcggggcgaggcggagaggtgcggcggcagccaatcagagcggcgcgctccgaaagtttccttttatggcgaggcggcggcggcggcggccctataaaaagcgaagcgcgcggcgggcgggagcaagcttcgtttagtgaaccgtcagatcgcctggagacgccatccacgctgttttgacctccatagaagacaccgggaccgatccagcctccgcggattcgaatcccggccgggaacggtgcattggaacgcggattccccgtgccaagagtgacgtaagtaccgcctatagagtctataggcccacaaaaaatgctttcttcttttaatatacttttttgtttatcttatttctaatactttccctaatctctttctttcagggcaataatgatacaatgtatcatgcctctttgcaccattctaaagaataacagtgataatttctgggttaaggcaatagcaatatttctgcatataaatatttctgcatataaattgtaactgatgtaagaggtttcatattgctaatagcagctacaatccagctaccattctgcttttattttatggttgggataaggctggattattctgagtccaagctaggcccttttgctaatcatgttcatacctcttatcttcctcccacagctcctgggcaacgtgctggtctgtgtgctggcccatcactttggcaaagaattgggattcgaaccggtgccgccaccatggagttttcaagtccttccagagaggaatgtcccaagcctttgagtagggtaagcatcatggctggcagcctcacaggattgcttctacttcaggcagtgtcgtgggcatcaggtgcccgcccctgcatccctaaaagcttcggctacagctcggtggtgtgtgtctgcaatgccacatactgtgactcctttgaccccccgacctttcctgcccttggtaccttcagccgctatgagagtacacgcagtgggcgacggatggagctgagtatggggcccatccaggctaatcacacgggcacaggcctgctactgaccctgcagccagaacagaagttccagaaagtgaagggatttggaggggccatgacagatgctgctgctctcaacatccttgccctgtcaccccctgcccaaaatttgctacttaaatcgtacttctctgaagaaggaatcggatataacatcatccgggtacccatggccagctgtgacttctccatccgcacctacacctatgcagacacccctgatgatttccagttgcacaacttcagcctcccagaggaagataccaagctcaagatacccctgattcaccgagccctgcagttggcccagcgtcccgtttcactccttgccagcccctggacatcacccacttggctcaagaccaatggagcggtgaatgggaaggggtcactcaagggacagcccggagacatctaccaccagacctgggccagatactttgtgaagttcctggatgcctatgctgagcacaagttacagttctgggcagtgacagctgaaaatgagccttctgctgggctgttgagtggataccccttccagtgcctgggcttcacccctgaacatcagcgagacttcattgcccgtgacctaggtcctaccctcgccaacagtactcaccacaatgtccgcctactcatgctggatgaccaacgcttgctgctgccccactgggcaaaggtggtactgacagacccagaagcagctaaatatgttcatggcattgctgtacattggtacctggactttctggctccagccaaagccaccctaggggagacacaccgcctgttccccaacaccatgctctttgcctcagaggcctgtgtgggctccaagttctgggagcagagtgtgcggctaggctcctgggatcgagggatgcagtacagccacagcatcatcacgaacctcctgtaccatgtggtcggctggaccgactggaaccttgccctgaaccccgaaggaggacccaattgggtgcgtaactttgtcgacagtcccatcattgtagacatcaccaaggacacgttttacaaacagcccatgttctaccaccttggccacttcagcaagttcattcctgagggctcccagagagtggggctggttgccagtcagaagaacgacctggacgcagtggcactgatgcatcccgatggctctgctgttgtggtcgtgctaaaccgctcctctaaggatgtgcctcttaccatcaaggatcctgctgtgggcttcctggagacaatctcacctggctactccattcacacctacctgtggcgtcgccagagaaagaggcgagagggcagaggaagtcttctaacatgcggtgacgtggaggagaatcccggccctatgtacgccctcttcctcctggccagcctcctgggcgcggctctagccgtgaaagagatgcccatgcagactctggtccccgccaaagtggcctccaagaatgtcatccctgccctggaactggtggagcccattaagaagcacgaggtcccagcaaagtctgatgtttactgtgaggtgtgtgaattcctggtgaaggaggtgaccaagctgattgacaacaacaagactgagaaagaaatactcgacgcttttgacaaaatgtgctcgaagctgccgaagtccctgtcggaagagtgccaggaggtggtggacacgtacggcagctccatcctgtccatcctgctggaggaggtcagccctgagctggtgtgcagcatgctgcacctctgctctggctagtaactcgaggacggggtgaactacgcctgaggatccgatctttttccctctgccaaaaattatggggacatcatgaagccccttgagcatctgacttctggctaataaaggaaatttattttcattgcaatagtgtgttggaattttttgtgtctctcactcggcctaggtagataagtagcatggcgggttaatcattaactacaaggaacccctagtgatggagttggccactccctctctgcgcgctcgctcgctcactgaggccgggcgaccaaaggtcgcccgacgcccgggctttgcccgggcggcctcagtgagcgagcgagcgcgcag

SEQ ID NO: 1818 - DNA, 3512 bp, synthetic construct
  source 1..3512: mol_type = other DNA
ctgcgcgctcgctcgctcactgaggccgcccgggcaaagcccgggcgtcgggcgacctttggtcgcccggcctcagtgagcgagcgagcgcgcagagagggagtggccaactccatcactaggggttccttgtagttaatgattaacccgccatgctacttatctaccagggtaatggggatcctctagaactatagctagtcgacattgattattgactagttattaatagtaatcaattacggggtcattagttcatagcccatatatggagttccgcgttacataacttacggtaaatggcccgcctggctgaccgcccaacgacccccgcccattgacgtcaataatgacgtatgttcccatagtaacgccaatagggactttccattgacgtcaatgggtggagtatttacggtaaactgcccacttggcagtacatcaagtgtatcatatgccaagtacgccccctattgacgtcaatgacggtaaatggcccgcctggcattatgcccagtacatgaccttatgggactttcctacttggcagtacatctacgtattagtcatcgctattaccatgtcgaggccacgttctgcttcactctccccatctcccccccctccccacccccaattttgtatttatttattttttaattattttgtgcagcgatgggggcggggggggggggcgcgcgccaggcggggcggggcggggcgaggggcggggcggggcgaggcggagaggtgcggcggcagccaatcagagcggcgcgctccgaaagtttccttttatggcgaggcggcggcggcggcggccctataaaaagcgaagcgcgcggcgggcgggagcaagcttcgtttagtgaaccgtcagatcgcctggagacgccatccacgctgttttgacctccatagaagacaccgggaccgatccagcctccgcggattcgaatcccggccgggaacggtgcattggaacgcggattccccgtgccaagagtgacgtaagtaccgcctatagagtctataggcccacaaaaaatgctttcttcttttaatatacttttttgtttatcttatttctaatactttccctaatctctttctttcagggcaataatgatacaatgtatcatgcctctttgcaccattctaaagaataacagtgataatttctgggttaaggcaatagcaatatttctgcatataaatatttctgcatataaattgtaactgatgtaagaggtttcatattgctaatagcagctacaatccagctaccattctgcttttattttatggttgggataaggctggattattctgagtccaagctaggcccttttgctaatcatgttcatacctcttatcttcctcccacagctcctgggcaacgtgctggtctgtgtgctggcccatcactttggcaaagaattgggattcgaaccggtgccgccaccatggagttttcaagtccttccagagaggaatgtcccaagcctttgagtagggtaagcatcatggctggcagcctcacaggattgcttctacttcaggcagtgtcgtgggcatcaggtgcccgcccctgcatccctaaaagcttcggctacagctcggtggtgtgtgtctgcaatgccacatactgtgactcctttgaccccccgacctttcctgcccttggtaccttcagccgctatgagagtacacgcagtgggcgacggatggagctgagtatggggcccatccaggctaatcacacgggcacaggcctgctactgaccctgcagccagaacagaagttccagaaagtgaagggatttggaggggccatgacagatgctgctgctctcaacatccttgccctgtcaccccctgcccaaaatttgctacttaaatcgtacttctctgaagaaggaatcggatataacatcatccgggtacccatggccagctgtgacttctccatccgcacctacacctatgcagacacccctgatgatttccagttgcacaacttcagcctcccagaggaagataccaagctcaagatacccctgattcaccgagccctgcagttggcccagcgtcccgtttcactccttgccagcccctggacatcacccacttggctcaagaccaatggagcggtgaatgggaaggggtcactcaagggacagcccggagacatctaccaccagacctgggccagatactttgtgaagttcctggatgcctatgctgagcacaagttacagttctgggcagtgacagctgaaaatgagccttctgctgggctgttgagtggataccccttccagtgcctgggcttcacccctgaacatcagcgagacttcattgcccgtgacctaggtcctaccctcgccaacagtactcaccacaatgtccgcctactcatgctggatgaccaacgcttgctgctgccccactgggcaaaggtggtactgacagacccagaagcagctaaatatgttcatggcattgctgtacattggtacctggactttctggctccagccaaagccaccctaggggagacacaccgcctgttccccaacaccatgctctttgcctcagaggcctgtgtgggctccaagttctgggagcagagtgtgcggctaggctcctgggatcgagggatgcagtacagccacagcatcatcacgaacctcctgtaccatgtggtcggctggaccgactggaaccttgccctgaaccccgaaggaggacccaattgggtgcgtaactttgtcgacagtcccatcattgtagacatcaccaaggacacgttttacaaacagcccatgttctaccaccttggccacttcagcaagttcattcctgagggctcccagagagtggggctggttgccagtcagaagaacgacctggacgcagtggcactgatgcatcccgatggctctgctgttgtggtcgtgctaaaccgctcctctaaggatgtgcctcttaccatcaaggatcctgctgtgggcttcctggagacaatctcacctggctactccattcacacctacctgtggcgtcgccagggaggggggggttcgggtggcggcggaagtgggggcggtggttctctacggaagctgcggaagcggctactgctgcggaaacttcggaaacggctactgtagtaactcgaggacggggtgaactacgcctgaggatccgatctttttccctctgccaaaaattatggggacatcatgaagccccttgagcatctgacttctggctaataaaggaaatttattttcattgcaatagtgtgttggaattttttgtgtctctcactcggcctaggtagataagtagcatggcgggttaatcattaactacaaggaacccctagtgatggagttggccactccctctctgcgcgctcgctcgctcactgaggccgggcgaccaaaggtcgcccgacgcccgggctttgcccgggcggcctcagtgagcgagcgagcgcgcag

SEQ ID NO: 1819 - DNA, 3476 bp, synthetic construct
  source 1..3476: mol_type = other DNA
ctgcgcgctcgctcgctcactgaggccgcccgggcaaagcccgggcgtcgggcgacctttggtcgcccggcctcagtgagcgagcgagcgcgcagagagggagtggccaactccatcactaggggttccttgtagttaatgattaacccgccatgctacttatctaccagggtaatggggatcctctagaactatagctagtcgacattgattattgactagttattaatagtaatcaattacggggtcattagttcatagcccatatatggagttccgcgttacataacttacggtaaatggcccgcctggctgaccgcccaacgacccccgcccattgacgtcaataatgacgtatgttcccatagtaacgccaatagggactttccattgacgtcaatgggtggagtatttacggtaaactgcccacttggcagtacatcaagtgtatcatatgccaagtacgccccctattgacgtcaatgacggtaaatggcccgcctggcattatgcccagtacatgaccttatgggactttcctacttggcagtacatctacgtattagtcatcgctattaccatgtcgaggccacgttctgcttcactctccccatctcccccccctccccacccccaattttgtatttatttattttttaattattttgtgcagcgatgggggcggggggggggggcgcgcgccaggcggggcggggcggggcgaggggcggggcggggcgaggcggagaggtgcggcggcagccaatcagagcggcgcgctccgaaagtttccttttatggcgaggcggcggcggcggcggccctataaaaagcgaagcgcgcggcgggcgggagcaagcttcgtttagtgaaccgtcagatcgcctggagacgccatccacgctgttttgacctccatagaagacaccgggaccgatccagcctccgcggattcgaatcccggccgggaacggtgcattggaacgcggattccccgtgccaagagtgacgtaagtaccgcctatagagtctataggcccacaaaaaatgctttcttcttttaatatacttttttgtttatcttatttctaatactttccctaatctctttctttcagggcaataatgatacaatgtatcatgcctctttgcaccattctaaagaataacagtgataatttctgggttaaggcaatagcaatatttctgcatataaatatttctgcatataaattgtaactgatgtaagaggtttcatattgctaatagcagctacaatccagctaccattctgcttttattttatggttgggataaggctggattattctgagtccaagctaggcccttttgctaatcatgttcatacctcttatcttcctcccacagctcctgggcaacgtgctggtctgtgtgctggcccatcactttggcaaagaattgggattcgaaccggtgccgccaccatggagttttcaagtccttccagagaggaatgtcccaagcctttgagtagggtaagcatcatggctggcagcctcacaggattgcttctacttcaggcagtgtcgtgggcatcaggtatgaaggagaccgctgctgcaaagttcgagagacagcatatggatagctccacaagcgccgcagcccgcccctgcatccctaaaagcttcggctacagctcggtggtgtgtgtctgcaatgccacatactgtgactcctttgaccccccgacctttcctgcccttggtaccttcagccgctatgagagtacacgcagtgggcgacggatggagctgagtatggggcccatccaggctaatcacacgggcacaggcctgctactgaccctgcagccagaacagaagttccagaaagtgaagggatttggaggggccatgacagatgctgctgctctcaacatccttgccctgtcaccccctgcccaaaatttgctacttaaatcgtacttctctgaagaaggaatcggatataacatcatccgggtacccatggccagctgtgacttctccatccgcacctacacctatgcagacacccctgatgatttccagttgcacaacttcagcctcccagaggaagataccaagctcaagatacccctgattcaccgagccctgcagttggcccagcgtcccgtttcactccttgccagcccctggacatcacccacttggctcaagaccaatggagcggtgaatgggaaggggtcactcaagggacagcccggagacatctaccaccagacctgggccagatactttgtgaagttcctggatgcctatgctgagcacaagttacagttctgggcagtgacagctgaaaatgagccttctgctgggctgttgagtggataccccttccagtgcctgggcttcacccctgaacatcagcgagacttcattgcccgtgacctaggtcctaccctcgccaacagtactcaccacaatgtccgcctactcatgctggatgaccaacgcttgctgctgccccactgggcaaaggtggtactgacagacccagaagcagctaaatatgttcatggcattgctgtacattggtacctggactttctggctccagccaaagccaccctaggggagacacaccgcctgttccccaacaccatgctctttgcctcagaggcctgtgtgggctccaagttctgggagcagagtgtgcggctaggctcctgggatcgagggatgcagtacagccacagcatcatcacgaacctcctgtaccatgtggtcggctggaccgactggaaccttgccctgaaccccgaaggaggacccaattgggtgcgtaactttgtcgacagtcccatcattgtagacatcaccaaggacacgttttacaaacagcccatgttctaccaccttggccacttcagcaagttcattcctgagggctcccagagagtggggctggttgccagtcagaagaacgacctggacgcagtggcactgatgcatcccgatggctctgctgttgtggtcgtgctaaaccgctcctctaaggatgtgcctcttaccatcaaggatcctgctgtgggcttcctggagacaatctcacctggctactccattcacacctacctgtggcgtcgccagtagtaactcgaggacggggtgaactacgcctgaggatccgatctttttccctctgccaaaaattatggggacatcatgaagccccttgagcatctgacttctggctaataaaggaaatttattttcattgcaatagtgtgttggaattttttgtgtctctcactcggcctaggtagataagtagcatggcgggttaatcattaactacaaggaacccctagtgatggagttggccactccctctctgcgcgctcgctcgctcactgaggccgggcgaccaaaggtcgcccgacgcccgggctttgcccgggcggcctcagtgagcgagcgagcgcgcag

SEQ ID NO: 1820 - DNA, 3428 bp, synthetic construct
  source 1..3428: mol_type = other DNA
ctgcgcgctcgctcgctcactgaggccgcccgggcaaagcccgggcgtcgggcgacctttggtcgcccggcctcagtgagcgagcgagcgcgcagagagggagtggccaactccatcactaggggttccttgtagttaatgattaacccgccatgctacttatctaccagggtaatggggatcctctagaactatagctagtcgacattgattattgactagttattaatagtaatcaattacggggtcattagttcatagcccatatatggagttccgcgttacataacttacggtaaatggcccgcctggctgaccgcccaacgacccccgcccattgacgtcaataatgacgtatgttcccatagtaacgccaatagggactttccattgacgtcaatgggtggagtatttacggtaaactgcccacttggcagtacatcaagtgtatcatatgccaagtacgccccctattgacgtcaatgacggtaaatggcccgcctggcattatgcccagtacatgaccttatgggactttcctacttggcagtacatctacgtattagtcatcgctattaccatgtcgaggccacgttctgcttcactctccccatctcccccccctccccacccccaattttgtatttatttattttttaattattttgtgcagcgatgggggcggggggggggggcgcgcgccaggcggggcggggcggggcgaggggcggggcggggcgaggcggagaggtgcggcggcagccaatcagagcggcgcgctccgaaagtttccttttatggcgaggcggcggcggcggcggccctataaaaagcgaagcgcgcggcgggcgggagcaagcttcgtttagtgaaccgtcagatcgcctggagacgccatccacgctgttttgacctccatagaagacaccgggaccgatccagcctccgcggattcgaatcccggccgggaacggtgcattggaacgcggattccccgtgccaagagtgacgtaagtaccgcctatagagtctataggcccacaaaaaatgctttcttcttttaatatacttttttgtttatcttatttctaatactttccctaatctctttctttcagggcaataatgatacaatgtatcatgcctctttgcaccattctaaagaataacagtgataatttctgggttaaggcaatagcaatatttctgcatataaatatttctgcatataaattgtaactgatgtaagaggtttcatattgctaatagcagctacaatccagctaccattctgcttttattttatggttgggataaggctggattattctgagtccaagctaggcccttttgctaatcatgttcatacctcttatcttcctcccacagctcctgggcaacgtgctggtctgtgtgctggcccatcactttggcaaagaattgggattcgaaccggtgccgccaccatggagttttcaagtccttccagagaggaatgtcccaagcctttgagtagggtaagcatcatggctggcagcctcacaggattgcttctacttcaggcagtgtcgtgggcatcaggtgcccgcccctgcatccctaaaagcttcggctacagctcggtggtgtgtgtctgcaatgccacatactgtgactcctttgaccccccgacctttcctgcccttggtaccttcagccgctatgagagtacacgcagtgggcgacggatggagctgagtatggggcccatccaggctaatcacacgggcacaggcctgctactgaccctgcagccagaacagaagttccagaaagtgaagggatttggaggggccatgacagatgctgctgctctcaacatccttgccctgtcaccccctgcccaaaatttgctacttaaatcgtacttctctgaagaaggaatcggatataacatcatccgggtacccatggccagctgtgacttctccatccgcacctacacctatgcagacacccctgatgatttccagttgcacaacttcagcctcccagaggaagataccaagctcaagatacccctgattcaccgagccctgcagttggcccagcgtcccgtttcactccttgccagcccctggacatcacccacttggctcaagaccaatggagcggtgaatgggaaggggtcactcaagggacagcccggagacatctaccaccagacctgggccagatactttgtgaagttcctggatgcctatgctgagcacaagttacagttctgggcagtgacagctgaaaatgagccttctgctgggctgttgagtggataccccttccagtgcctgggcttcacccctgaacatcagcgagacttcattgcccgtgacctaggtcctaccctcgccaacagtactcaccacaatgtccgcctactcatgctggatgaccaacgcttgctgctgccccactgggcaaaggtggtactgacagacccagaagcagctaaatatgttcatggcattgctgtacattggtacctggactttctggctccagccaaagccaccctaggggagacacaccgcctgttccccaacaccatgctctttgcctcagaggcctgtgtgggctccaagttctgggagcagagtgtgcggctaggctcctgggatcgagggatgcagtacagccacagcatcatcacgaacctcctgtaccatgtggtcggctggaccgactggaaccttgccctgaaccccgaaggaggacccaattgggtgcgtaactttgtcgacagtcccatcattgtagacatcaccaaggacacgttttacaaacagcccatgttctaccaccttggccacttcagcaagttcattcctgagggctcccagagagtggggctggttgccagtcagaagaacgacctggacgcagtggcactgatgcatcccgatggctctgctgttgtggtcgtgctaaaccgctcctctaaggatgtgcctcttaccatcaaggatcctgctgtgggcttcctggagacaatctcacctggctactccattcacacctacctgtggcgtcgccagcagagattcttcgagtagtaactcgaggacggggtgaactacgcctgaggatccgatctttttccctctgccaaaaattatggggacatcatgaagccccttgagcatctgacttctggctaataaaggaaatttattttcattgcaatagtgtgttggaattttttgtgtctctcactcggcctaggtagataagtagcatggcgggttaatcattaactacaaggaacccctagtgatggagttggccactccctctctgcgcgctcgctcgctcactgaggccgggcgaccaaaggtcgcccgacgcccgggctttgcccgggcggcctcagtgagcgagcgagcgcgcag

SEQ ID NO: 1821 - DNA, 3375 bp, synthetic construct
  source 1..3375: mol_type = other DNA
ctgcgcgctcgctcgctcactgaggccgcccgggcaaagcccgggcgtcgggcgacctttggtcgcccggcctcagtgagcgagcgagcgcgcagagagggagtggccaactccatcactaggggttccttgtagttaatgattaacccgccatgctacttatctaccagggtaatggggatcctctagaactatagctagtcgacataacgcgtgcatgcgtgaggctccggtgcccgtcagtgggcagagcgcacatcgcccacagtccccgagaagttggggggaggggtcggcaattgaaccggtgcctagagaaggtggcgcggggtaaactgggaaagtgatgtcgtgtactggctccgcctttttcccgagggtgggggagaaccgtatataagtgcagtagtcgccgtgaacgttctttttcgcaacgggtttgccgccagaacacaggtaagtgccgtgtgtggttcccgcgggcctggcctctttacgggttatggcccttgcgtgccttgaattacttccacctggctgcagtacgtgattcttgatcccgagcttcgggttggaagtgggtgggagagttcgaggccttgcgcttaaggagccccttcgcctcgtgcttgagttgaggcctggcctgggcgctggggccgccgcgtgcgaatctggtggcaccttcgcgcctgtctcgctgctttcgataagtctctagccatttaaaatttttgatgacctgctgcgacgctttttttctggcaagatagtcttgtaaatgcgggccaagatctgcacactggtatttcggtttttggggccgcgggcggcgacggggcccgtgcgtcccagcgcacatgttcggcgaggcggggcctgcgagcgcggccaccgagaatcggacgggggtagtctcaagctggccggcctgctctggtgcctggcctcgcgccgccgtgtatcgccccgccctgggcggcaaggctggcccggtcggcaccagttgcgtgagcggaaagatggccgcttcccggccctgctgcagggagctcaaaatggaggacgcggcgctcgggagagcgggcgggtgagtcacccacacaaaggaaaagggcctttccgtcctcagccgtcgcttcatgtgactccacggagtaccgggcgccgtccaggcacctcgattagttctcgagcttttggagtacgtcgtctttaggttggggggaggggttttatgcgatggagtttccccacactgagtgggtggagactgaagttaggccagcttggcacttgatgtaattctccttggaatttgccctttttgagtttggatcttggttcattctcaagcctcagacagtggttcaaagtttttttcttccatttcaggtgtcgtgagggattcgaaccggtgccgccaccatggagttttcaagtccttccagagaggaatgtcccaagcctttgagtagggtaagcatcatggctggcagcctcacaggattgcttctacttcaggcagtgtcgtgggcatcaggtgcccgcccctgcatccctaaaagcttcggctacagctcggtggtgtgtgtctgcaatgccacatactgtgactcctttgaccccccgacctttcctgcccttggtaccttcagccgctatgagagtacacgcagtgggcgacggatggagctgagtatggggcccatccaggctaatcacacgggcacaggcctgctactgaccctgcagccagaacagaagttccagaaagtgaagggatttggaggggccatgacagatgctgctgctctcaacatccttgccctgtcaccccctgcccaaaatttgctacttaaatcgtacttctctgaagaaggaatcggatataacatcatccgggtacccatggccagctgtgacttctccatccgcacctacacctatgcagacacccctgatgatttccagttgcacaacttcagcctcccagaggaagataccaagctcaagatacccctgattcaccgagccctgcagttggcccagcgtcccgtttcactccttgccagcccctggacatcacccacttggctcaagaccaatggagcggtgaatgggaaggggtcactcaagggacagcccggagacatctaccaccagacctgggccagatactttgtgaagttcctggatgcctatgctgagcacaagttacagttctgggcagtgacagctgaaaatgagccttctgctgggctgttgagtggataccccttccagtgcctgggcttcacccctgaacatcagcgagacttcattgcccgtgacctaggtcctaccctcgccaacagtactcaccacaatgtccgcctactcatgctggatgaccaacgcttgctgctgccccactgggcaaaggtggtactgacagacccagaagcagctaaatatgttcatggcattgctgtacattggtacctggactttctggctccagccaaagccaccctaggggagacacaccgcctgttccccaacaccatgctctttgcctcagaggcctgtgtgggctccaagttctgggagcagagtgtgcggctaggctcctgggatcgagggatgcagtacagccacagcatcatcacgaacctcctgtaccatgtggtcggctggaccgactggaaccttgccctgaaccccgaaggaggacccaattgggtgcgtaactttgtcgacagtcccatcattgtagacatcaccaaggacacgttttacaaacagcccatgttctaccaccttggccacttcagcaagttcattcctgagggctcccagagagtggggctggttgccagtcagaagaacgacctggacgcagtggcactgatgcatcccgatggctctgctgttgtggtcgtgctaaaccgctcctctaaggatgtgcctcttaccatcaaggatcctgctgtgggcttcctggagacaatctcacctggctactccattcacacctacctgtggcgtcgccagtagtaactcgaggacggggtgaactacgcctgaggatccgatctttttccctctgccaaaaattatggggacatcatgaagccccttgagcatctgacttctggctaataaaggaaatttattttcattgcaatagtgtgttggaattttttgtgtctctcactcggcctaggtagataagtagcatggcgggttaatcattaactacaaggaacccctagtgatggagttggccactccctctctgcgcgctcgctcgctcactgaggccgggcgaccaaaggtcgcccgacgcccgggctttgcccgggcggcctcagtgagcgagcgagcgcgcag

SEQ ID NO: 1822 - DNA, 3878 bp, synthetic construct
  source 1..3878: mol_type = other DNA
ctgcgcgctcgctcgctcactgaggccgcccgggcaaagcccgggcgtcgggcgacctttggtcgcccggcctcagtgagcgagcgagcgcgcagagagggagtggccaactccatcactaggggttccttgtagttaatgattaacccgccatgctacttatctaccagggtaatggggatcctctagaactatagctagtcgacattgattattgactagttattaatagtaatcaattacggggtcattagttcatagcccatatatggagttccgcgttacataacttacggtaaatggcccgcctggctgaccgcccaacgacccccgcccattgacgtcaataatgacgtatgttcccatagtaacgccaatagggactttccattgacgtcaatgggtggagtatttacggtaaactgcccacttggcagtacatcaagtgtatcatatgccaagtacgccccctattgacgtcaatgacggtaaatggcccgcctggcattatgcccagtacatgaccttatgggactttcctacttggcagtacatctacgtattagtcatcgctattaccatgtcgaggccacgttctgcttcactctccccatctcccccccctccccacccccaattttgtatttatttattttttaattattttgtgcagcgatgggggcggggggggggggcgcgcgccaggcggggcggggcggggcgaggggcggggcggggcgaggcggagaggtgcggcggcagccaatcagagcggcgcgctccgaaagtttccttttatggcgaggcggcggcggcggcggccctataaaaagcgaagcgcgcggcgggcgggagcaagcttcgtttagtgaaccgtcagatcgcctggagacgccatccacgctgttttgacctccatagaagacaccgggaccgatccagcctccgcggattcgaatcccggccgggaacggtgcattggaacgcggattccccgtgccaagagtgacgtaagtaccgcctatagagtctataggcccacaaaaaatgctttcttcttttaatatacttttttgtttatcttatttctaatactttccctaatctctttctttcagggcaataatgatacaatgtatcatgcctctttgcaccattctaaagaataacagtgataatttctgggttaaggcaatagcaatatttctgcatataaatatttctgcatataaattgtaactgatgtaagaggtttcatattgctaatagcagctacaatccagctaccattctgcttttattttatggttgggataaggctggattattctgagtccaagctaggcccttttgctaatcatgttcatacctcttatcttcctcccacagctcctgggcaacgtgctggtctgtgtgctggcccatcactttggcaaagaattgggattcgaaccggtgccgccaccatggaattctctagcccatctagagaggaatgtcctaagcctctgtcaagagtgtccatcatggccggcagcctgacaggcctgctgctgctgcaggccgtgtcctgggccagtggagcccggccctgcatccctaagtccttcggctattctagcgtggtctgcgtgtgtaatgccacttactgcgacagcttcgaccctcctaccttccccgcccttggaacattcagcagatacgagagcaccagaagcggcagaagaatggaactgagcatgggcccaatccaggccaaccacaccggcaccggcctgctgctgacactgcaacctgagcagaagttccagaaggtgaagggatttggaggcgccatgaccgacgctgctgctctgaacatcctggccctctccccacctgctcagaacctgctgcttaaaagctacttcagcgaggaaggcatcggctataacatcatcagagtgcccatggccagctgcgacttcagcatcagaacatacacctacgccgatacacctgatgacttccaactgcacaacttcagcctgcctgaagaggacacaaagctgaaaatccccctgatccaccgggccctgcagctggcccagagacctgtgagcctgctggcctctccttggacaagccccacctggctgaagaccaatggagctgtgaacggcaagggcagcctgaagggccagcccggcgacatctaccaccaaacctgggctcgctacttcgtgaaattcctggacgcctacgctgagcataagctgcaattttgggccgttacagccgagaacgagccttctgccggcctgctgtctggatatcctttccagtgcctgggcttcacccctgagcaccagagagactttatcgccagagatctggggcctaccctggctaacagcacacaccacaacgtgcggctgctgatgctggacgatcagaggctgctgctcccccactgggccaaggtggtgctgacagatccggaggccgccaaatacgtgcacggcatcgccgtccactggtacctggatttcctggcccctgccaaggccaccctgggcgagacacatagactgtttcctaataccatgctgttcgccagcgaggcctgcgtgggcagcaagttctgggaacagagcgtgcggctgggcagctgggacagaggaatgcagtacagccacagcatcattaccaacctgctgtaccacgtggtgggctggaccgactggaacctggccctgaaccccgaaggcggccccaactgggtgcggaacttcgtggactctcctatcatcgtggatattaccaaggataccttttacaagcagcctatgttctaccacctgggccacttcagcaagttcatccctgagggctctcagcgggtgggcctggtggcctctcagaaaaacgacctggatgccgttgccctgatgcaccccgacggcagcgccgtggtggtcgtcctgaatagaagctccaaggacgtgcctctgaccatcaaggaccccgctgtgggatttctggaaaccatcagccctggctacagcatccacacctacctgtggcggcggcagagaaagaggcgagagggcagaggaagtcttctaacatgcggtgacgtggaggagaatcccggccctatgtacgccctcttcctcctggccagcctcctgggcgcggctctagccgtgaaagagatgcccatgcagactctggtccccgccaaagtggcctccaagaatgtcatccctgccctggaactggtggagcccattaagaagcacgaggtcccagcaaagtctgatgtttactgtgaggtgtgtgaattcctggtgaaggaggtgaccaagctgattgacaacaacaagactgagaaagaaatactcgacgcttttgacaaaatgtgctcgaagctgccgaagtccctgtcggaagagtgccaggaggtggtggacacgtacggcagctccatcctgtccatcctgctggaggaggtcagccctgagctggtgtgcagcatgctgcacctctgctctggctagtaactcgaggacggggtgaactacgcctgaggatccgatctttttccctctgccaaaaattatggggacatcatgaagccccttgagcatctgacttctggctaataaaggaaatttattttcattgcaatagtgtgttggaattttttgtgtctctcactcggcctaggtagataagtagcatggcgggttaatcattaactacaaggaacccctagtgatggagttggccactccctctctgcgcgctcgctcgctcactgaggccgggcgaccaaaggtcgcccgacgcccgggctttgcccgggcggcctcagtgagcgagcgagcgcgcag

SEQ ID NO: 1823 - DNA, 3512 bp, synthetic construct
  source 1..3512: mol_type = other DNA
ctgcgcgctcgctcgctcactgaggccgcccgggcaaagcccgggcgtcgggcgacctttggtcgcccggcctcagtgagcgagcgagcgcgcagagagggagtggccaactccatcactaggggttccttgtagttaatgattaacccgccatgctacttatctaccagggtaatggggatcctctagaactatagctagtcgacattgattattgactagttattaatagtaatcaattacggggtcattagttcatagcccatatatggagttccgcgttacataacttacggtaaatggcccgcctggctgaccgcccaacgacccccgcccattgacgtcaataatgacgtatgttcccatagtaacgccaatagggactttccattgacgtcaatgggtggagtatttacggtaaactgcccacttggcagtacatcaagtgtatcatatgccaagtacgccccctattgacgtcaatgacggtaaatggcccgcctggcattatgcccagtacatgaccttatgggactttcctacttggcagtacatctacgtattagtcatcgctattaccatgtcgaggccacgttctgcttcactctccccatctcccccccctccccacccccaattttgtatttatttattttttaattattttgtgcagcgatgggggcggggggggggggcgcgcgccaggcggggcggggcggggcgaggggcggggcggggcgaggcggagaggtgcggcggcagccaatcagagcggcgcgctccgaaagtttccttttatggcgaggcggcggcggcggcggccctataaaaagcgaagcgcgcggcgggcgggagcaagcttcgtttagtgaaccgtcagatcgcctggagacgccatccacgctgttttgacctccatagaagacaccgggaccgatccagcctccgcggattcgaatcccggccgggaacggtgcattggaacgcggattccccgtgccaagagtgacgtaagtaccgcctatagagtctataggcccacaaaaaatgctttcttcttttaatatacttttttgtttatcttatttctaatactttccctaatctctttctttcagggcaataatgatacaatgtatcatgcctctttgcaccattctaaagaataacagtgataatttctgggttaaggcaatagcaatatttctgcatataaatatttctgcatataaattgtaactgatgtaagaggtttcatattgctaatagcagctacaatccagctaccattctgcttttattttatggttgggataaggctggattattctgagtccaagctaggcccttttgctaatcatgttcatacctcttatcttcctcccacagctcctgggcaacgtgctggtctgtgtgctggcccatcactttggcaaagaattgggattcgaaccggtgccgccaccatggaattctctagcccatctagagaggaatgtcctaagcctctgtcaagagtgtccatcatggccggcagcctgacaggcctgctgctgctgcaggccgtgtcctgggccagtggagcccggccctgcatccctaagtccttcggctattctagcgtggtctgcgtgtgtaatgccacttactgcgacagcttcgaccctcctaccttccccgcccttggaacattcagcagatacgagagcaccagaagcggcagaagaatggaactgagcatgggcccaatccaggccaaccacaccggcaccggcctgctgctgacactgcaacctgagcagaagttccagaaggtgaagggatttggaggcgccatgaccgacgctgctgctctgaacatcctggccctctccccacctgctcagaacctgctgcttaaaagctacttcagcgaggaaggcatcggctataacatcatcagagtgcccatggccagctgcgacttcagcatcagaacatacacctacgccgatacacctgatgacttccaactgcacaacttcagcctgcctgaagaggacacaaagctgaaaatccccctgatccaccgggccctgcagctggcccagagacctgtgagcctgctggcctctccttggacaagccccacctggctgaagaccaatggagctgtgaacggcaagggcagcctgaagggccagcccggcgacatctaccaccaaacctgggctcgctacttcgtgaaattcctggacgcctacgctgagcataagctgcaattttgggccgttacagccgagaacgagccttctgccggcctgctgtctggatatcctttccagtgcctgggcttcacccctgagcaccagagagactttatcgccagagatctggggcctaccctggctaacagcacacaccacaacgtgcggctgctgatgctggacgatcagaggctgctgctcccccactgggccaaggtggtgctgacagatccggaggccgccaaatacgtgcacggcatcgccgtccactggtacctggatttcctggcccctgccaaggccaccctgggcgagacacatagactgtttcctaataccatgctgttcgccagcgaggcctgcgtgggcagcaagttctgggaacagagcgtgcggctgggcagctgggacagaggaatgcagtacagccacagcatcattaccaacctgctgtaccacgtggtgggctggaccgactggaacctggccctgaaccccgaaggcggccccaactgggtgcggaacttcgtggactctcctatcatcgtggatattaccaaggataccttttacaagcagcctatgttctaccacctgggccacttcagcaagttcatccctgagggctctcagcgggtgggcctggtggcctctcagaaaaacgacctggatgccgttgccctgatgcaccccgacggcagcgccgtggtggtcgtcctgaatagaagctccaaggacgtgcctctgaccatcaaggaccccgctgtgggatttctggaaaccatcagccctggctacagcatccacacctacctgtggcggcggcagggaggggggggttcgggtggcggcggaagtgggggcggtggttctctacggaagctgcggaagcggctactgctgcggaaacttcggaaacggctactgtagtaactcgaggacggggtgaactacgcctgaggatccgatctttttccctctgccaaaaattatggggacatcatgaagccccttgagcatctgacttctggctaataaaggaaatttattttcattgcaatagtgtgttggaattttttgtgtctctcactcggcctaggtagataagtagcatggcgggttaatcattaactacaaggaacccctagtgatggagttggccactccctctctgcgcgctcgctcgctcactgaggccgggcgaccaaaggtcgcccgacgcccgggctttgcccgggcggcctcagtgagcgagcgagcgcgcag

SEQ ID NO: 1824 - DNA, 3476 bp, synthetic construct
  source 1..3476: mol_type = other DNA
ctgcgcgctcgctcgctcactgaggccgcccgggcaaagcccgggcgtcgggcgacctttggtcgcccggcctcagtgagcgagcgagcgcgcagagagggagtggccaactccatcactaggggttccttgtagttaatgattaacccgccatgctacttatctaccagggtaatggggatcctctagaactatagctagtcgacattgattattgactagttattaatagtaatcaattacggggtcattagttcatagcccatatatggagttccgcgttacataacttacggtaaatggcccgcctggctgaccgcccaacgacccccgcccattgacgtcaataatgacgtatgttcccatagtaacgccaatagggactttccattgacgtcaatgggtggagtatttacggtaaactgcccacttggcagtacatcaagtgtatcatatgccaagtacgccccctattgacgtcaatgacggtaaatggcccgcctggcattatgcccagtacatgaccttatgggactttcctacttggcagtacatctacgtattagtcatcgctattaccatgtcgaggccacgttctgcttcactctccccatctcccccccctccccacccccaattttgtatttatttattttttaattattttgtgcagcgatgggggcggggggggggggcgcgcgccaggcggggcggggcggggcgaggggcggggcggggcgaggcggagaggtgcggcggcagccaatcagagcggcgcgctccgaaagtttccttttatggcgaggcggcggcggcggcggccctataaaaagcgaagcgcgcggcgggcgggagcaagcttcgtttagtgaaccgtcagatcgcctggagacgccatccacgctgttttgacctccatagaagacaccgggaccgatccagcctccgcggattcgaatcccggccgggaacggtgcattggaacgcggattccccgtgccaagagtgacgtaagtaccgcctatagagtctataggcccacaaaaaatgctttcttcttttaatatacttttttgtttatcttatttctaatactttccctaatctctttctttcagggcaataatgatacaatgtatcatgcctctttgcaccattctaaagaataacagtgataatttctgggttaaggcaatagcaatatttctgcatataaatatttctgcatataaattgtaactgatgtaagaggtttcatattgctaatagcagctacaatccagctaccattctgcttttattttatggttgggataaggctggattattctgagtccaagctaggcccttttgctaatcatgttcatacctcttatcttcctcccacagctcctgggcaacgtgctggtctgtgtgctggcccatcactttggcaaagaattgggattcgaaccggtgccgccaccatggaattctctagcccatctagagaggaatgtcctaagcctctgtcaagagtgtccatcatggccggcagcctgacaggcctgctgctgctgcaggccgtgtcctgggccagtggaatgaaggagaccgctgctgcaaagttcgagagacagcatatggatagctccacaagcgccgcagcccggccctgcatccctaagtccttcggctattctagcgtggtctgcgtgtgtaatgccacttactgcgacagcttcgaccctcctaccttccccgcccttggaacattcagcagatacgagagcaccagaagcggcagaagaatggaactgagcatgggcccaatccaggccaaccacaccggcaccggcctgctgctgacactgcaacctgagcagaagttccagaaggtgaagggatttggaggcgccatgaccgacgctgctgctctgaacatcctggccctctccccacctgctcagaacctgctgcttaaaagctacttcagcgaggaaggcatcggctataacatcatcagagtgcccatggccagctgcgacttcagcatcagaacatacacctacgccgatacacctgatgacttccaactgcacaacttcagcctgcctgaagaggacacaaagctgaaaatccccctgatccaccgggccctgcagctggcccagagacctgtgagcctgctggcctctccttggacaagccccacctggctgaagaccaatggagctgtgaacggcaagggcagcctgaagggccagcccggcgacatctaccaccaaacctgggctcgctacttcgtgaaattcctggacgcctacgctgagcataagctgcaattttgggccgttacagccgagaacgagccttctgccggcctgctgtctggatatcctttccagtgcctgggcttcacccctgagcaccagagagactttatcgccagagatctggggcctaccctggctaacagcacacaccacaacgtgcggctgctgatgctggacgatcagaggctgctgctcccccactgggccaaggtggtgctgacagatccggaggccgccaaatacgtgcacggcatcgccgtccactggtacctggatttcctggcccctgccaaggccaccctgggcgagacacatagactgtttcctaataccatgctgttcgccagcgaggcctgcgtgggcagcaagttctgggaacagagcgtgcggctgggcagctgggacagaggaatgcagtacagccacagcatcattaccaacctgctgtaccacgtggtgggctggaccgactggaacctggccctgaaccccgaaggcggccccaactgggtgcggaacttcgtggactctcctatcatcgtggatattaccaaggataccttttacaagcagcctatgttctaccacctgggccacttcagcaagttcatccctgagggctctcagcgggtgggcctggtggcctctcagaaaaacgacctggatgccgttgccctgatgcaccccgacggcagcgccgtggtggtcgtcctgaatagaagctccaaggacgtgcctctgaccatcaaggaccccgctgtgggatttctggaaaccatcagccctggctacagcatccacacctacctgtggcggcggcagtagtaactcgaggacggggtgaactacgcctgaggatccgatctttttccctctgccaaaaattatggggacatcatgaagccccttgagcatctgacttctggctaataaaggaaatttattttcattgcaatagtgtgttggaattttttgtgtctctcactcggcctaggtagataagtagcatggcgggttaatcattaactacaaggaacccctagtgatggagttggccactccctctctgcgcgctcgctcgctcactgaggccgggcgaccaaaggtcgcccgacgcccgggctttgcccgggcggcctcagtgagcgagcgagcgcgcag

SEQ ID NO: 1825 - DNA, 3428 bp, synthetic construct
  source 1..3428: mol_type = other DNA
ctgcgcgctcgctcgctcactgaggccgcccgggcaaagcccgggcgtcgggcgacctttggtcgcccggcctcagtgagcgagcgagcgcgcagagagggagtggccaactccatcactaggggttccttgtagttaatgattaacccgccatgctacttatctaccagggtaatggggatcctctagaactatagctagtcgacattgattattgactagttattaatagtaatcaattacggggtcattagttcatagcccatatatggagttccgcgttacataacttacggtaaatggcccgcctggctgaccgcccaacgacccccgcccattgacgtcaataatgacgtatgttcccatagtaacgccaatagggactttccattgacgtcaatgggtggagtatttacggtaaactgcccacttggcagtacatcaagtgtatcatatgccaagtacgccccctattgacgtcaatgacggtaaatggcccgcctggcattatgcccagtacatgaccttatgggactttcctacttggcagtacatctacgtattagtcatcgctattaccatgtcgaggccacgttctgcttcactctccccatctcccccccctccccacccccaattttgtatttatttattttttaattattttgtgcagcgatgggggcggggggggggggcgcgcgccaggcggggcggggcggggcgaggggcggggcggggcgaggcggagaggtgcggcggcagccaatcagagcggcgcgctccgaaagtttccttttatggcgaggcggcggcggcggcggccctataaaaagcgaagcgcgcggcgggcgggagcaagcttcgtttagtgaaccgtcagatcgcctggagacgccatccacgctgttttgacctccatagaagacaccgggaccgatccagcctccgcggattcgaatcccggccgggaacggtgcattggaacgcggattccccgtgccaagagtgacgtaagtaccgcctatagagtctataggcccacaaaaaatgctttcttcttttaatatacttttttgtttatcttatttctaatactttccctaatctctttctttcagggcaataatgatacaatgtatcatgcctctttgcaccattctaaagaataacagtgataatttctgggttaaggcaatagcaatatttctgcatataaatatttctgcatataaattgtaactgatgtaagaggtttcatattgctaatagcagctacaatccagctaccattctgcttttattttatggttgggataaggctggattattctgagtccaagctaggcccttttgctaatcatgttcatacctcttatcttcctcccacagctcctgggcaacgtgctggtctgtgtgctggcccatcactttggcaaagaattgggattcgaaccggtgccgccaccatggaattctctagcccatctagagaggaatgtcctaagcctctgtcaagagtgtccatcatggccggcagcctgacaggcctgctgctgctgcaggccgtgtcctgggccagtggagcccggccctgcatccctaagtccttcggctattctagcgtggtctgcgtgtgtaatgccacttactgcgacagcttcgaccctcctaccttccccgcccttggaacattcagcagatacgagagcaccagaagcggcagaagaatggaactgagcatgggcccaatccaggccaaccacaccggcaccggcctgctgctgacactgcaacctgagcagaagttccagaaggtgaagggatttggaggcgccatgaccgacgctgctgctctgaacatcctggccctctccccacctgctcagaacctgctgcttaaaagctacttcagcgaggaaggcatcggctataacatcatcagagtgcccatggccagctgcgacttcagcatcagaacatacacctacgccgatacacctgatgacttccaactgcacaacttcagcctgcctgaagaggacacaaagctgaaaatccccctgatccaccgggccctgcagctggcccagagacctgtgagcctgctggcctctccttggacaagccccacctggctgaagaccaatggagctgtgaacggcaagggcagcctgaagggccagcccggcgacatctaccaccaaacctgggctcgctacttcgtgaaattcctggacgcctacgctgagcataagctgcaattttgggccgttacagccgagaacgagccttctgccggcctgctgtctggatatcctttccagtgcctgggcttcacccctgagcaccagagagactttatcgccagagatctggggcctaccctggctaacagcacacaccacaacgtgcggctgctgatgctggacgatcagaggctgctgctcccccactgggccaaggtggtgctgacagatccggaggccgccaaatacgtgcacggcatcgccgtccactggtacctggatttcctggcccctgccaaggccaccctgggcgagacacatagactgtttcctaataccatgctgttcgccagcgaggcctgcgtgggcagcaagttctgggaacagagcgtgcggctgggcagctgggacagaggaatgcagtacagccacagcatcattaccaacctgctgtaccacgtggtgggctggaccgactggaacctggccctgaaccccgaaggcggccccaactgggtgcggaacttcgtggactctcctatcatcgtggatattaccaaggataccttttacaagcagcctatgttctaccacctgggccacttcagcaagttcatccctgagggctctcagcgggtgggcctggtggcctctcagaaaaacgacctggatgccgttgccctgatgcaccccgacggcagcgccgtggtggtcgtcctgaatagaagctccaaggacgtgcctctgaccatcaaggaccccgctgtgggatttctggaaaccatcagccctggctacagcatccacacctacctgtggcggcggcagcagagattcttcgagtagtaactcgaggacggggtgaactacgcctgaggatccgatctttttccctctgccaaaaattatggggacatcatgaagccccttgagcatctgacttctggctaataaaggaaatttattttcattgcaatagtgtgttggaattttttgtgtctctcactcggcctaggtagataagtagcatggcgggttaatcattaactacaaggaacccctagtgatggagttggccactccctctctgcgcgctcgctcgctcactgaggccgggcgaccaaaggtcgcccgacgcccgggctttgcccgggcggcctcagtgagcgagcgagcgcgcag

SEQ ID NO: 1826 - DNA, 3500 bp, synthetic construct
  source 1..3500: mol_type = other DNA
ctgcgcgctcgctcgctcactgaggccgcccgggcaaagcccgggcgtcgggcgacctttggtcgcccggcctcagtgagcgagcgagcgcgcagagagggagtggccaactccatcactaggggttccttgtagttaatgattaacccgccatgctacttatctaccagggtaatggggatcctctagaactatagctagtcgacattgattattgactagttattaatagtaatcaattacggggtcattagttcatagcccatatatggagttccgcgttacataacttacggtaaatggcccgcctggctgaccgcccaacgacccccgcccattgacgtcaataatgacgtatgttcccatagtaacgccaatagggactttccattgacgtcaatgggtggagtatttacggtaaactgcccacttggcagtacatcaagtgtatcatatgccaagtacgccccctattgacgtcaatgacggtaaatggcccgcctggcattatgcccagtacatgaccttatgggactttcctacttggcagtacatctacgtattagtcatcgctattaccatgtcgaggccacgttctgcttcactctccccatctcccccccctccccacccccaattttgtatttatttattttttaattattttgtgcagcgatgggggcggggggggggggcgcgcgccaggcggggcggggcggggcgaggggcggggcggggcgaggcggagaggtgcggcggcagccaatcagagcggcgcgctccgaaagtttccttttatggcgaggcggcggcggcggcggccctataaaaagcgaagcgcgcggcgggcgggagcaagcttcgtttagtgaaccgtcagatcgcctggagacgccatccacgctgttttgacctccatagaagacaccgggaccgatccagcctccgcggattcgaatcccggccgggaacggtgcattggaacgcggattccccgtgccaagagtgacgtaagtaccgcctatagagtctataggcccacaaaaaatgctttcttcttttaatatacttttttgtttatcttatttctaatactttccctaatctctttctttcagggcaataatgatacaatgtatcatgcctctttgcaccattctaaagaataacagtgataatttctgggttaaggcaatagcaatatttctgcatataaatatttctgcatataaattgtaactgatgtaagaggtttcatattgctaatagcagctacaatccagctaccattctgcttttattttatggttgggataaggctggattattctgagtccaagctaggcccttttgctaatcatgttcatacctcttatcttcctcccacagctcctgggcaacgtgctggtctgtgtgctggcccatcactttggcaaagaattgggattcgaaccggtgccgccaccatggagttttcaagtccttccagagaggaatgtcccaagcctttgagtagggtaagcatcatggctggcagcctcacaggattgcttctacttcaggcagtgtcgtgggcatcaggtgcccgcccctgcatccctaaaagcttcggctacagctcggtggtgtgtgtctgcaatgccacatactgtgactcctttgaccccccgacctttcctgcccttggtaccttcagccgctatgagagtacacgcagtgggcgacggatggagctgagtatggggcccatccaggctaatcacacgggcacaggcctgctactgaccctgcagccagaacagaagttccagaaagtgaagggatttggaggggccatgacagatgctgctgctctcaacatccttgccctgtcaccccctgcccaaaatttgctacttaaatcgtacttctctgaagaaggaatcggatataacatcatccgggtacccatggccagctgtgacttctccatccgcacctacacctatgcagacacccctgatgatttccagttgcacaacttcagcctcccagaggaagataccaagctcaagatacccctgattcaccgagccctgcagttggcccagcgtcccgtttcactccttgccagcccctggacatcacccacttggctcaagaccaatggagcggtgaatgggaaggggtcactcaagggacagcccggagacatctaccaccagacctgggccagatactttgtgaagttcctggatgcctatgctgagcacaagttacagttctgggcagtgacagctgaaaatgagccttctgctgggctgttgagtggataccccttccagtgcctgggcttcacccctgaacatcagcgagacttcattgcccgtgacctaggtcctaccctcgccaacagtactcaccacaatgtccgcctactcatgctggatgaccaacgcttgctgctgccccactgggcaaaggtggtactgacagacccagaagcagctaaatatgttcatggcattgctgtacattggtacctggactttctggctccagccaaagccaccctaggggagacacaccgcctgttccccaacaccatgctctttgcctcagaggcctgtgtgggctccaagttctgggagcagagtgtgcggctaggctcctgggatcgagggatgcagtacagccacagcatcatcacgaacctcctgtaccatgtggtcggctggaccgactggaaccttgccctgaaccccgaaggaggacccaattgggtgcgtaactttgtcgacagtcccatcattgtagacatcaccaaggacacgttttacaaacagcccatgttctaccaccttggccacttcagcaagttcattcctgagggctcccagagagtggggctggttgccagtcagaagaacgacctggacgcagtggcactgatgcatcccgatggctctgctgttgtggtcgtgctaaaccgctcctctaaggatgtgcctcttaccatcaaggatcctgctgtgggcttcctggagacaatctcacctggctactccattcacacctacctgtggcgtcgccagggaggggggggttcgggtggcggcggaagtgggggcggtggttcttatggcaggaaaaagcggaggcaaaggcgccgccccccccagtagtaactcgaggacggggtgaactacgcctgaggatccgatctttttccctctgccaaaaattatggggacatcatgaagccccttgagcatctgacttctggctaataaaggaaatttattttcattgcaatagtgtgttggaattttttgtgtctctcactcggcctaggtagataagtagcatggcgggttaatcattaactacaaggaacccctagtgatggagttggccactccctctctgcgcgctcgctcgctcactgaggccgggcgaccaaaggtcgcccgacgcccgggctttgcccgggcggcctcagtgagcgagcgagcgcgcag

SEQ ID NO: 1827 - DNA, 3500 bp, synthetic construct
  source 1..3500: mol_type = other DNA
ctgcgcgctcgctcgctcactgaggccgcccgggcaaagcccgggcgtcgggcgacctttggtcgcccggcctcagtgagcgagcgagcgcgcagagagggagtggccaactccatcactaggggttccttgtagttaatgattaacccgccatgctacttatctaccagggtaatggggatcctctagaactatagctagtcgacattgattattgactagttattaatagtaatcaattacggggtcattagttcatagcccatatatggagttccgcgttacataacttacggtaaatggcccgcctggctgaccgcccaacgacccccgcccattgacgtcaataatgacgtatgttcccatagtaacgccaatagggactttccattgacgtcaatgggtggagtatttacggtaaactgcccacttggcagtacatcaagtgtatcatatgccaagtacgccccctattgacgtcaatgacggtaaatggcccgcctggcattatgcccagtacatgaccttatgggactttcctacttggcagtacatctacgtattagtcatcgctattaccatgtcgaggccacgttctgcttcactctccccatctcccccccctccccacccccaattttgtatttatttattttttaattattttgtgcagcgatgggggcggggggggggggcgcgcgccaggcggggcggggcggggcgaggggcggggcggggcgaggcggagaggtgcggcggcagccaatcagagcggcgcgctccgaaagtttccttttatggcgaggcggcggcggcggcggccctataaaaagcgaagcgcgcggcgggcgggagcaagcttcgtttagtgaaccgtcagatcgcctggagacgccatccacgctgttttgacctccatagaagacaccgggaccgatccagcctccgcggattcgaatcccggccgggaacggtgcattggaacgcggattccccgtgccaagagtgacgtaagtaccgcctatagagtctataggcccacaaaaaatgctttcttcttttaatatacttttttgtttatcttatttctaatactttccctaatctctttctttcagggcaataatgatacaatgtatcatgcctctttgcaccattctaaagaataacagtgataatttctgggttaaggcaatagcaatatttctgcatataaatatttctgcatataaattgtaactgatgtaagaggtttcatattgctaatagcagctacaatccagctaccattctgcttttattttatggttgggataaggctggattattctgagtccaagctaggcccttttgctaatcatgttcatacctcttatcttcctcccacagctcctgggcaacgtgctggtctgtgtgctggcccatcactttggcaaagaattgggattcgaaccggtgccgccaccatggaattctctagcccatctagagaggaatgtcctaagcctctgtcaagagtgtccatcatggccggcagcctgacaggcctgctgctgctgcaggccgtgtcctgggccagtggagcccggccctgcatccctaagtccttcggctattctagcgtggtctgcgtgtgtaatgccacttactgcgacagcttcgaccctcctaccttccccgcccttggaacattcagcagatacgagagcaccagaagcggcagaagaatggaactgagcatgggcccaatccaggccaaccacaccggcaccggcctgctgctgacactgcaacctgagcagaagttccagaaggtgaagggatttggaggcgccatgaccgacgctgctgctctgaacatcctggccctctccccacctgctcagaacctgctgcttaaaagctacttcagcgaggaaggcatcggctataacatcatcagagtgcccatggccagctgcgacttcagcatcagaacatacacctacgccgatacacctgatgacttccaactgcacaacttcagcctgcctgaagaggacacaaagctgaaaatccccctgatccaccgggccctgcagctggcccagagacctgtgagcctgctggcctctccttggacaagccccacctggctgaagaccaatggagctgtgaacggcaagggcagcctgaagggccagcccggcgacatctaccaccaaacctgggctcgctacttcgtgaaattcctggacgcctacgctgagcataagctgcaattttgggccgttacagccgagaacgagccttctgccggcctgctgtctggatatcctttccagtgcctgggcttcacccctgagcaccagagagactttatcgccagagatctggggcctaccctggctaacagcacacaccacaacgtgcggctgctgatgctggacgatcagaggctgctgctcccccactgggccaaggtggtgctgacagatccggaggccgccaaatacgtgcacggcatcgccgtccactggtacctggatttcctggcccctgccaaggccaccctgggcgagacacatagactgtttcctaataccatgctgttcgccagcgaggcctgcgtgggcagcaagttctgggaacagagcgtgcggctgggcagctgggacagaggaatgcagtacagccacagcatcattaccaacctgctgtaccacgtggtgggctggaccgactggaacctggccctgaaccccgaaggcggccccaactgggtgcggaacttcgtggactctcctatcatcgtggatattaccaaggataccttttacaagcagcctatgttctaccacctgggccacttcagcaagttcatccctgagggctctcagcgggtgggcctggtggcctctcagaaaaacgacctggatgccgttgccctgatgcaccccgacggcagcgccgtggtggtcgtcctgaatagaagctccaaggacgtgcctctgaccatcaaggaccccgctgtgggatttctggaaaccatcagccctggctacagcatccacacctacctgtggcggcggcagggaggggggggttcgggtggcggcggaagtgggggcggtggttcttatggcaggaaaaagcggaggcaaaggcgccgccccccccagtagtaactcgaggacggggtgaactacgcctgaggatccgatctttttccctctgccaaaaattatggggacatcatgaagccccttgagcatctgacttctggctaataaaggaaatttattttcattgcaatagtgtgttggaattttttgtgtctctcactcggcctaggtagataagtagcatggcgggttaatcattaactacaaggaacccctagtgatggagttggccactccctctctgcgcgctcgctcgctcactgaggccgggcgaccaaaggtcgcccgacgcccgggctttgcccgggcggcctcagtgagcgagcgagcgcgcag

SEQ ID NO: 1828 - DNA, 3571 bp, synthetic construct
  source 1..3571: mol_type = other DNA
ctgcgcgctcgctcgctcactgaggccgcccgggcaaagcccgggcgtcgggcgacctttggtcgcccggcctcagtgagcgagcgagcgcgcagagagggagtggccaactccatcactaggggttccttgtagttaatgattaacccgccatgctacttatctaccagggtaatggggatcctctagaactatagctagtcgacattgattattgactagttattaatagtaatcaattacggggtcattagttcatagcccatatatggagttccgcgttacataacttacggtaaatggcccgcctggctgaccgcccaacgacccccgcccattgacgtcaataatgacgtatgttcccatagtaacgccaatagggactttccattgacgtcaatgggtggagtatttacggtaaactgcccacttggcagtacatcaagtgtatcatatgccaagtacgccccctattgacgtcaatgacggtaaatggcccgcctggcattatgcccagtacatgaccttatgggactttcctacttggcagtacatctacgtattagtcatcgctattaccatgtcgaggccacgttctgcttcactctccccatctcccccccctccccacccccaattttgtatttatttattttttaattattttgtgcagcgatgggggcggggggggggggcgcgcgccaggcggggcggggcggggcgaggggcggggcggggcgaggcggagaggtgcggcggcagccaatcagagcggcgcgctccgaaagtttccttttatggcgaggcggcggcggcggcggccctataaaaagcgaagcgcgcggcgggcgggagcaagcttcgtttagtgaaccgtcagatcgcctggagacgccatccacgctgttttgacctccatagaagacaccgggaccgatccagcctccgcggattcgaatcccggccgggaacggtgcattggaacgcggattccccgtgccaagagtgacgtaagtaccgcctatagagtctataggcccacaaaaaatgctttcttcttttaatatacttttttgtttatcttatttctaatactttccctaatctctttctttcagggcaataatgatacaatgtatcatgcctctttgcaccattctaaagaataacagtgataatttctgggttaaggcaatagcaatatttctgcatataaatatttctgcatataaattgtaactgatgtaagaggtttcatattgctaatagcagctacaatccagctaccattctgcttttattttatggttgggataaggctggattattctgagtccaagctaggcccttttgctaatcatgttcatacctcttatcttcctcccacagctcctgggcaacgtgctggtctgtgtgctggcccatcactttggcaaagaattgggattcgaaccggtgccgccaccatggaattctctagcccatctagagaggaatgtcctaagcctctgtcaagagtgtccatcatggccggcagcctgacaggcctgctgctgctgcaggccgtgtcctgggccagtggagcccggccctgcatccctaagtccttcggctattctagcgtggtctgcgtgtgtaatgccacttactgcgacagcttcgaccctcctaccttccccgcccttggaacattcagcagatacgagagcaccagaagcggcagaagaatggaactgagcatgggcccaatccaggccaaccacaccggcaccggcctgctgctgacactgcaacctgagcagaagttccagaaggtgaagggatttggaggcgccatgaccgacgctgctgctctgaacatcctggccctctccccacctgctcagaacctgctgcttaaaagctacttcagcgaggaaggcatcggctataacatcatcagagtgcccatggccagctgcgacttcagcatcagaacatacacctacgccgatacacctgatgacttccaactgcacaacttcagcctgcctgaagaggacacaaagctgaaaatccccctgatccaccgggccctgcagctggcccagagacctgtgagcctgctggcctctccttggacaagccccacctggctgaagaccaatggagctgtgaacggcaagggcagcctgaagggccagcccggcgacatctaccaccaaacctgggctcgctacttcgtgaaattcctggacgcctacgctgagcataagctgcaattttgggccgttacagccgagaacgagccttctgccggcctgctgtctggatatcctttccagtgcctgggcttcacccctgagcaccagagagactttatcgccagagatctggggcctaccctggctaacagcacacaccacaacgtgcggctgctgatgctggacgatcagaggctgctgctcccccactgggccaaggtggtgctgacagatccggaggccgccaaatacgtgcacggcatcgccgtccactggtacctggatttcctggcccctgccaaggccaccctgggcgagacacatagactgtttcctaataccatgctgttcgccagcgaggcctgcgtgggcagcaagttctgggaacagagcgtgcggctgggcagctgggacagaggaatgcagtacagccacagcatcattaccaacctgctgtaccacgtggtgggctggaccgactggaacctggccctgaaccccgaaggcggccccaactgggtgcggaacttcgtggactctcctatcatcgtggatattaccaaggataccttttacaagcagcctatgttctaccacctgggccacttcagcaagttcatccctgagggctctcagcgggtgggcctggtggcctctcagaaaaacgacctggatgccgttgccctgatgcaccccgacggcagcgccgtggtggtcgtcctgaatagaagctccaaggacgtgcctctgaccatcaaggaccccgctgtgggatttctggaaaccatcagccctggctacagcatccacacctacctgtggcggcggcagtagtaacctcgaggtaccaggagctcttctcctagtgaattctaccagtgccatagatagttaagtgaattctaccagtgccatagatagttaagtgaattctaccagtgccatagatagttaagtgaattctaccagtgccatactgcagtcaggtctataccatcgaggacggggtgaactacgcctgaggatccgatctttttccctctgccaaaaattatggggacatcatgaagccccttgagcatctgacttctggctaataaaggaaatttattttcattgcaatagtgtgttggaattttttgtgtctctcactcggcctaggtagataagtagcatggcgggttaatcattaactacaaggaacccctagtgatggagttggccactccctctctgcgcgctcgctcgctcactgaggccgggcgaccaaaggtcgcccgacgcccgggctttgcccgggcggcctcagtgagcgagcgagcgcgcag

SEQ ID NO: 1829 - DNA, 130 bp, synthetic construct
  source 1..130: mol_type = other DNA
ctgcgcgctcgctcgctcactgaggccgcccgggcaaagcccgggcgtcgggcgacctttggtcgcccggcctcagtgagcgagcgagcgcgcagagagggagtggccaactccatcactaggggttcct

SEQ ID NO: 1830 - DNA, 130 bp, synthetic construct
  source 1..130: mol_type = other DNA
aggaacccctagtgatggagttggccactccctctctgcgcgctcgctcgctcactgaggccgggcgaccaaaggtcgcccgacgcccgggctttgcccgggcggcctcagtgagcgagcgagcgcgcag

SEQ ID NO: 1831 - DNA, 380 bp, synthetic construct
  source 1..380: mol_type = other DNA
gacattgattattgactagttattaatagtaatcaattacggggtcattagttcatagcccatatatggagttccgcgttacataacttacggtaaatggcccgcctggctgaccgcccaacgacccccgcccattgacgtcaataatgacgtatgttcccatagtaacgccaatagggactttccattgacgtcaatgggtggagtatttacggtaaactgcccacttggcagtacatcaagtgtatcatatgccaagtacgccccctattgacgtcaatgacggtaaatggcccgcctggcattatgcccagtacatgaccttatgggactttcctacttggcagtacatctacgtattagtcatcgctattaccatg

SEQ ID NO: 1832 - protein, 13 aa, synthetic construct
GSGSPHSKAQNLQ

SEQ ID NO: 1833 - protein, 13 aa, synthetic construct
GGGSPHSKAQNQQ

SEQ ID NO: 1834 - DNA, 260 bp, synthetic construct
  source 1..260: mol_type = other DNA
ccacgttctgcttcactctccccatctcccccccctccccacccccaattttgtatttatttattttttaattattttgtgcagcgatgggggcggggggggggggcgcgcgccaggcggggcggggcggggcgaggggcggggcggggcgaggcggagaggtgcggcggcagccaatcagagcggcgcgctccgaaagtttccttttatggcgaggcggcggcggcggcggccctataaaaagcgaagcgcgcggcggg

SEQ ID NO: 1835 - protein, 13 aa, synthetic construct
GGGSPHSKAQNKQ

SEQ ID NO: 1836 - protein, 13 aa, synthetic construct
GSGSPHSKAQDQE

SEQ ID NO: 1837 - protein, 13 aa, synthetic construct
KSGSPHSKAQNQQ

SEQ ID NO: 1838 - protein, 13 aa, synthetic construct
GGGSPHSKAQNQL

SEQ ID NO: 1839 - protein, 13 aa, synthetic construct
GSGSPHSKAQNHQ

SEQ ID NO: 1840 - protein, 13 aa, synthetic construct
GSGSPHSKAQDQQ

SEQ ID NO: 1841 - protein, 13 aa, synthetic construct
GGGSPHSKSQNQL

SEQ ID NO: 1842 - DNA, 566 bp, synthetic construct
  source 1..566: mol_type = other DNA
tcagatcgcctggagacgccatccacgctgttttgacctccatagaagacaccgggaccgatccagcctccgcggattcgaatcccggccgggaacggtgcattggaacgcggattccccgtgccaagagtgacgtaagtaccgcctatagagtctataggcccacaaaaaatgctttcttcttttaatatacttttttgtttatcttatttctaatactttccctaatctctttctttcagggcaataatgatacaatgtatcatgcctctttgcaccattctaaagaataacagtgataatttctgggttaaggcaatagcaatatttctgcatataaatatttctgcatataaattgtaactgatgtaagaggtttcatattgctaatagcagctacaatccagctaccattctgcttttattttatggttgggataaggctggattattctgagtccaagctaggcccttttgctaatcatgttcatacctcttatcttcctcccacagctcctgggcaacgtgctggtctgtgtgctggcccatcactttggcaaagaatt

SEQ ID NO: 1843 - protein, 13 aa, synthetic construct
GSGSPHSKGHWQQ

SEQ ID NO: 1844 - protein, 13 aa, synthetic construct
GSGSPHSKAPNQQ

SEQ ID NO: 1845 - protein, 13 aa, synthetic construct
GSGSPHSKAQNQL

SEQ ID NO: 1846 - DNA, 127 bp, synthetic construct
  source 1..127: mol_type = other DNA
gatctttttccctctgccaaaaattatggggacatcatgaagccccttgagcatctgacttctggctaataaaggaaatttattttcattgcaatagtgtgttggaattttttgtgtctctcactcg

SEQ ID NO: 1847 - DNA, 22 bp, synthetic construct
  source 1..22: mol_type = other DNA
agtgaattctaccagtgccata

SEQ ID NO: 1848 - protein, 13 aa, synthetic construct
GNGSPHSKAQNQH

SEQ ID NO: 1849 - DNA, 112 bp, synthetic construct
  source 1..112: mol_type = other DNA
agtgaattctaccagtgccatagatagttaagtgaattctaccagtgccatagatagttaagtgaattctaccagtgccatagatagttaagtgaattctaccagtgccata

SEQ ID NO: 1850 - DNA, 117 bp, synthetic construct
  source 1..117: mol_type = other DNA
atggaattctctagcccatctagagaggaatgtcctaagcctctgtcaagagtgtccatcatggccggcagcctgacaggcctgctgctgctgcaggccgtgtcctgggccagtgga

SEQ ID NO: 1851 - protein, 13 aa, synthetic construct
GSGSPHSKALHQH

SEQ ID NO: 1852 - protein, 13 aa, synthetic construct
GTGSPHSKAQNHQ

SEQ ID NO: 1853 - protein, 39 aa, synthetic construct
MEFSSPSREECPKPLSRVSIMAGSLTGLLLLQAVSWASG

SEQ ID NO: 1854 - protein, 13 aa, synthetic construct
GSGSPHSKAQYIH

SEQ ID NO: 1855 - protein, 13 aa, synthetic construct
GGGSPHSKAHNQQ

SEQ ID NO: 1856 - protein, 13 aa, synthetic construct
GSGSPHSKAQKFE

SEQ ID NO: 1857 - protein, 13 aa, synthetic construct
ESGSPHSKAQNHQ

SEQ ID NO: 1858 - protein, 13 aa, synthetic construct
GSGSPHSKAQFPS

SEQ ID NO: 1859 - protein, 13 aa, synthetic construct
PSGSPHSKAQNQQ

SEQ ID NO: 1860 - protein, 13 aa, synthetic construct
GNGSPHSKAQNPL

SEQ ID NO: 1861 - protein, 13 aa, synthetic construct
GGGSPHSKAQSQQ

SEQ ID NO: 1862 - protein, 13 aa, synthetic construct
GSGSPHSKAQAIK

SEQ ID NO: 1863 - protein, 13 aa, synthetic construct
GSGSPHSKGQNRQ

SEQ ID NO: 1864 - protein, 13 aa, synthetic construct
GSGSPHSKAQSQQ

SEQ ID NO: 1865 - protein, 13 aa, synthetic construct
GSVSPHGKAQNQL

SEQ ID NO: 1866 - protein, 13 aa, synthetic construct
ASGSPHSKAQNQL

SEQ ID NO: 1867 - protein, 13 aa, synthetic construct
RSGSPHSKAQNQQ

SEQ ID NO: 1868 - protein, 13 aa, synthetic construct
GSGSPHSKAQYQH

SEQ ID NO: 1869 - protein, 13 aa, synthetic construct
GSGSPHTKAQNPQ

SEQ ID NO: 1870 - DNA, 3571 bp, synthetic construct
  source 1..3571: mol_type = other DNA
ctgcgcgctcgctcgctcactgaggccgcccgggcaaagcccgggcgtcgggcgacctttggtcgcccggcctcagtgagcgagcgagcgcgcagagagggagtggccaactccatcactaggggttccttgtagttaatgattaacccgccatgctacttatctaccagggtaatggggatcctctagaactatagctagtcgacattgattattgactagttattaatagtaatcaattacggggtcattagttcatagcccatatatggagttccgcgttacataacttacggtaaatggcccgcctggctgaccgcccaacgacccccgcccattgacgtcaataatgacgtatgttcccatagtaacgccaatagggactttccattgacgtcaatgggtggagtatttacggtaaactgcccacttggcagtacatcaagtgtatcatatgccaagtacgccccctattgacgtcaatgacggtaaatggcccgcctggcattatgcccagtacatgaccttatgggactttcctacttggcagtacatctacgtattagtcatcgctattaccatgtcgaggccacgttctgcttcactctccccatctcccccccctccccacccccaattttgtatttatttattttttaattattttgtgcagcgatgggggcggggggggggggcgcgcgccaggcggggcggggcggggcgaggggcggggcggggcgaggcggagaggtgcggcggcagccaatcagagcggcgcgctccgaaagtttccttttatggcgaggcggcggcggcggcggccctataaaaagcgaagcgcgcggcgggcgggagcaagcttcgtttagtgaaccgtcagatcgcctggagacgccatccacgctgttttgacctccatagaagacaccgggaccgatccagcctccgcggattcgaatcccggccgggaacggtgcattggaacgcggattccccgtgccaagagtgacgtaagtaccgcctatagagtctataggcccacaaaaaatgctttcttcttttaatatacttttttgtttatcttatttctaatactttccctaatctctttctttcagggcaataatgatacaatgtatcatgcctctttgcaccattctaaagaataacagtgataatttctgggttaaggcaatagcaatatttctgcatataaatatttctgcatataaattgtaactgatgtaagaggtttcatattgctaatagcagctacaatccagctaccattctgcttttattttatggttgggataaggctggattattctgagtccaagctaggcccttttgctaatcatgttcatacctcttatcttcctcccacagctcctgggcaacgtgctggtctgtgtgctggcccatcactttggcaaagaattgggattcgaaccggtgccgccaccatggagttttcaagtccttccagagaggaatgtcccaagcctttgagtagggtaagcatcatggctggcagcctcacaggattgcttctacttcaggcagtgtcgtgggcatcaggtgcccgcccctgcatccctaaaagcttcggctacagctcggtggtgtgtgtctgcaatgccacatactgtgactcctttgaccccccgacctttcctgcccttggtaccttcagccgctatgagagtacacgcagtgggcgacggatggagctgagtatggggcccatccaggctaatcacacgggcacaggcctgctactgaccctgcagccagaacagaagttccagaaagtgaagggatttggaggggccatgacagatgctgctgctctcaacatccttgccctgtcaccccctgcccaaaatttgctacttaaatcgtacttctctgaagaaggaatcggatataacatcatccgggtacccatggccagctgtgacttctccatccgcacctacacctatgcagacacccctgatgatttccagttgcacaacttcagcctcccagaggaagataccaagctcaagatacccctgattcaccgagccctgcagttggcccagcgtcccgtttcactccttgccagcccctggacatcacccacttggctcaagaccaatggagcggtgaatgggaaggggtcactcaagggacagcccggagacatctaccaccagacctgggccagatactttgtgaagttcctggatgcctatgctgagcacaagttacagttctgggcagtgacagctgaaaatgagccttctgctgggctgttgagtggataccccttccagtgcctgggcttcacccctgaacatcagcgagacttcattgcccgtgacctaggtcctaccctcgccaacagtactcaccacaatgtccgcctactcatgctggatgaccaacgcttgctgctgccccactgggcaaaggtggtactgacagacccagaagcagctaaatatgttcatggcattgctgtacattggtacctggactttctggctccagccaaagccaccctaggggagacacaccgcctgttccccaacaccatgctctttgcctcagaggcctgtgtgggctccaagttctgggagcagagtgtgcggctaggctcctgggatcgagggatgcagtacagccacagcatcatcacgaacctcctgtaccatgtggtcggctggaccgactggaaccttgccctgaaccccgaaggaggacccaattgggtgcgtaactttgtcgacagtcccatcattgtagacatcaccaaggacacgttttacaaacagcccatgttctaccaccttggccacttcagcaagttcattcctgagggctcccagagagtggggctggttgccagtcagaagaacgacctggacgcagtggcactgatgcatcccgatggctctgctgttgtggtcgtgctaaaccgctcctctaaggatgtgcctcttaccatcaaggatcctgctgtgggcttcctggagacaatctcacctggctactccattcacacctacctgtggcgtcgccagtagtaacctcgaggtaccaggagctcttctcctagtgaattctaccagtgccatagatagttaagtgaattctaccagtgccatagatagttaagtgaattctaccagtgccatagatagttaagtgaattctaccagtgccatactgcagtcaggtctataccatcgaggacggggtgaactacgcctgaggatccgatctttttccctctgccaaaaattatggggacatcatgaagccccttgagcatctgacttctggctaataaaggaaatttattttcattgcaatagtgtgttggaattttttgtgtctctcactcggcctaggtagataagtagcatggcgggttaatcattaactacaaggaacccctagtgatggagttggccactccctctctgcgcgctcgctcgctcactgaggccgggcgaccaaaggtcgcccgacgcccgggctttgcccgggcggcctcagtgagcgagcgagcgcgcag

SEQ ID NO: 1871 - protein, 13 aa, synthetic construct
GSGSPHSKAQHQL

SEQ ID NO: 1872 - protein, 13 aa, synthetic construct
GSGSPHSKAQSPP

SEQ ID NO: 1873 - protein, 13 aa, synthetic construct
GSGSPHSKAQAKL

SEQ ID NO: 1874 - protein, 13 aa, synthetic construct
GSGSPHSKTKSQQ

SEQ ID NO: 1875 - protein, 13 aa, synthetic construct
GSGSPHSKAQDRP

SEQ ID NO: 1876 - protein, 13 aa, synthetic construct
GIGSPHSKAQNLG

SEQ ID NO: 1877 - protein, 13 aa, synthetic construct
GSGSPHSKAQAFH

SEQ ID NO: 1878 - protein, 13 aa, synthetic construct
GSGSPHSKAQKQQ

SEQ ID NO: 1879 - protein, 13 aa, synthetic construct
GSGSPHSKAQNAQ

SEQ ID NO: 1880 - protein, 13 aa, synthetic construct
WSGSPHSKAQNQQ

SEQ ID NO: 1881 - protein, 13 aa, synthetic construct
GSGSPHSKAHNQL

SEQ ID NO: 1882 - protein, 13 aa, synthetic construct
GNGSPHSKAQNHQ

SEQ ID NO: 1883 - protein, 13 aa, synthetic construct
GGGSPHSKAQNLQ

SEQ ID NO: 1884 - protein, 13 aa, synthetic construct
GSGSPHSKAQKLN

SEQ ID NO: 1885 - protein, 13 aa, synthetic construct
GGGSPHSKSQNQH

SEQ ID NO: 1886 - protein, 13 aa, synthetic construct
GSGSPHSKSQNVQ

SEQ ID NO: 1887 - protein, 13 aa, synthetic construct
GSGSPHSKAQAQQ

SEQ ID NO: 1888 - protein, 13 aa, synthetic construct
DSGSPHSKAQNQQ

SEQ ID NO: 1889 - protein, 13 aa, synthetic construct
ASGSPHSKAPNQQ

SEQ ID NO: 1890 - protein, 13 aa, synthetic construct
GSGSPHSKAQTPP

SEQ ID NO: 1891 - protein, 13 aa, synthetic construct
IDGSPHSKAQNQQ

SEQ ID NO: 1892 - protein, 13 aa, synthetic construct
GSGSPHNKAQNHQ

SEQ ID NO: 1893 - protein, 13 aa, synthetic construct
GSGSPHSKAQPPA

SEQ ID NO: 1894 - protein, 13 aa, synthetic construct
GSGSPHSKAQERP

SEQ ID NO: 1895 - protein, 13 aa, synthetic construct
GSGSPHSKAQDLQ

SEQ ID NO: 1896 - protein, 13 aa, synthetic construct
GGGSPHSKAQNPP

SEQ ID NO: 1897 - protein, 13 aa, synthetic construct
GSGSPHSKAQAMH

SEQ ID NO: 1898 - protein, 13 aa, synthetic construct
GSGSPHSKALNQQ

SEQ ID NO: 1899 - protein, 13 aa, synthetic construct
GSGSPHSKAQHPS

SEQ ID NO: 1900 - protein, 13 aa, synthetic construct
GLGSPHSKSQNQQ

SEQ ID NO: 1901 - protein, 13 aa, synthetic construct
GTGSPHSKAQNQQ

SEQ ID NO: 1902 - protein, 13 aa, synthetic construct
GSGSPHSKAPGLQ

SEQ ID NO: 1903 - protein, 13 aa, synthetic construct
GSGSPHSKAQGIR

SEQ ID NO: 1904 - protein, 13 aa, synthetic construct
GSGSPHSKAQAPA

SEQ ID NO: 1905 - protein, 13 aa, synthetic construct
GSGSPHSKSQSQQ

SEQ ID NO: 1906 - protein, 13 aa, synthetic construct
GSGSPHSKAQIPP

SEQ ID NO: 1907 - protein, 13 aa, synthetic construct
GSGSPHSKAQTQL

SEQ ID NO: 1908 - protein, 13 aa, synthetic construct
GSGSPHSKAQAPS

SEQ ID NO: 1909 - protein, 13 aa, synthetic construct
DAGSPHSKAQNQQ

SEQ ID NO: 1910 - protein, 13 aa, synthetic construct
GSGSPHSKGQNQQ

SEQ ID NO: 1911 - protein, 13 aa, synthetic construct
DGGSPHSKAQNQQ

SEQ ID NO: 1912 - protein, 13 aa, synthetic construct
ASGSPHSKAHNQQ

SEQ ID NO: 1913 - protein, 13 aa, synthetic construct
GSGSPHSKAQNTY

SEQ ID NO: 1914 - protein, 13 aa, synthetic construct
GSGSPHSKSQNQH

SEQ ID NO: 1915 - protein, 13 aa, synthetic construct
GGGSPHSKAQDKQ

SEQ ID NO: 1916 - protein, 13 aa, synthetic construct
GSGSPHSKAQNHL

SEQ ID NO: 1917 - protein, 13 aa, synthetic construct
GSGSPHSKAQIGM

SEQ ID NO: 1918 - protein, 13 aa, synthetic construct
GSGSPHSKALNKQ

SEQ ID NO: 1919 - protein, 13 aa, synthetic construct
GGGSPHSKAQNPQ

SEQ ID NO: 1920 - protein, 13 aa, synthetic construct
GTGSPHSKAPNQL

SEQ ID NO: 1921 - protein, 13 aa, synthetic construct
GSGSPHSKAQLQQ

SEQ ID NO: 1922 - protein, 13 aa, synthetic construct
GGGSPHSKAQYQQ

SEQ ID NO: 1923 - protein, 13 aa, synthetic construct
GGGSPHSKAQHQQ

SEQ ID NO: 1924 - protein, 13 aa, synthetic construct
GSGSPHSKAQRMS

SEQ ID NO: 1925 - protein, 13 aa, synthetic construct
GSGSPHSKAQGIL

SEQ ID NO: 1926 - protein, 13 aa, synthetic construct
GSGSPHSKAQDRQ

SEQ ID NO: 1927 - protein, 13 aa, synthetic construct
GSGSPHSKARDWQ

SEQ ID NO: 1928 - protein, 13 aa, synthetic construct
GSGSPHSKAQNTH

SEQ ID NO: 1929 - protein, 13 aa, synthetic construct
GSGSPHSKAQERS

SEQ ID NO: 1930 - protein, 13 aa, synthetic construct
GSGSPHSKAQNYQ

SEQ ID NO: 1931 - protein, 13 aa, synthetic construct
GSGSPHSKAQRTC

SEQ ID NO: 1932 - protein, 13 aa, synthetic construct
GSGSPHSKAQIGH

SEQ ID NO: 1933 - protein, 13 aa, synthetic construct
GSGSPHSKAQGAI

SEQ ID NO: 1934 - protein, 13 aa, synthetic construct
GSGSPHSKAQVPP

SEQ ID NO: 1935 - protein, 13 aa, synthetic construct
GSGSPHSKAQVQQ

SEQ ID NO: 1936 - protein, 13 aa, synthetic construct
GSGSPHSKALMRQ

SEQ ID NO: 1937 - protein, 13 aa, synthetic construct
GSGSPHSKAQYSV

SEQ ID NO: 1938 - protein, 13 aa, synthetic construct
GSGSPHSKVPNLQ

SEQ ID NO: 1939 - protein, 13 aa, synthetic construct
GSGSPHSKAQAIT

SEQ ID NO: 1940 - protein, 13 aa, synthetic construct
GSGSPHSKAQKTL

SEQ ID NO: 1941 - protein, 13 aa, synthetic construct
GSGSPHSKAQNQW

SEQ ID NO: 1942 - protein, 13 aa, synthetic construct
GSGSPHSKAQLHH

SEQ ID NO: 1943 - protein, 13 aa, synthetic construct
GSGSPHSKAQNII

SEQ ID NO: 1944 - protein, 13 aa, synthetic construct
MEGSPHSKAQNQQ

SEQ ID NO: 1945 - protein, 13 aa, synthetic construct
GSGSPHSKAQGHH

SEQ ID NO: 1946 - protein, 13 aa, synthetic construct
GSGSPHSKAQSKV

SEQ ID NO: 1947 - protein, 13 aa, synthetic construct
GSGSPHSKAQLPS

SEQ ID NO: 1948 - protein, 13 aa, synthetic construct
GSGSPHSKAIGKQ

SEQ ID NO: 1949 - protein, 13 aa, synthetic construct
GGGSPHSKSQNQQ

SEQ ID NO: 1950 - protein, 13 aa, synthetic construct
GSGSPHSKAQAIH

SEQ ID NO: 1951 - protein, 13 aa, synthetic construct
GSGSPHSKAQHGL

SEQ ID NO: 1952 - protein, 13 aa, synthetic construct
GSGSPHSKAQFMC

SEQ ID NO: 1953 - protein, 13 aa, synthetic construct
VSGSPHSKAQGQQ

SEQ ID NO: 1954 - protein, 13 aa, synthetic construct
GGGSPHSKAQNQM

SEQ ID NO: 1955 - protein, 13 aa, synthetic construct
GSGSPHSKAQHLQ

SEQ ID NO: 1956 - protein, 13 aa, synthetic construct
ENGSPHSKAQNQQ

SEQ ID NO: 1957 - protein, 13 aa, synthetic construct
GSGSPHSKTQNHQ

SEQ ID NO: 1958 - protein, 13 aa, synthetic construct
GSGSPHSKAQPAR

SEQ ID NO: 1959 - protein, 13 aa, synthetic construct
GSGSPHSKAQSLQ

SEQ ID NO: 1960 - protein, 13 aa, synthetic construct
GSGSPHSKSQSQL

SEQ ID NO: 1961 - protein, 13 aa, synthetic construct
GSASPHSKAHSQQ

SEQ ID NO: 1962 - protein, 13 aa, synthetic construct
GSGSPHSKAQMPS

SEQ ID NO: 1963 - protein, 13 aa, synthetic construct
GSGSPHSKAQGSL

SEQ ID NO: 1964 - protein, 13 aa, synthetic construct
GSGSPHSKSQNQQ

SEQ ID NO: 1965 - protein, 13 aa, synthetic construct
GNGSPHSKSQNQQ

SEQ ID NO: 1966 - protein, 13 aa, synthetic construct
GSGSPHSKAQVPA

SEQ ID NO: 1967 - protein, 13 aa, synthetic construct
GNGSPHSKAQNLQ

SEQ ID NO: 1968 - protein, 13 aa, synthetic construct
GSGSPHSKAQDKQ

SEQ ID NO: 1969 - protein, 13 aa, synthetic construct
GSGSPHSKAHYQQ

SEQ ID NO: 1970 - protein, 13 aa, synthetic construct
GSGSPHSKAQVPS

SEQ ID NO: 1971 - protein, 13 aa, synthetic construct
GGGSPHSKAQNHQ

SEQ ID NO: 1972 - protein, 13 aa, synthetic construct
GSGSPHSKARGEQ

SEQ ID NO: 1973 - protein, 13 aa, synthetic construct
GGGSPHSKAQYQH

SEQ ID NO: 1974 - protein, 13 aa, synthetic construct
GSGSPHSKAPGQQ

SEQ ID NO: 1975 - protein, 13 aa, synthetic construct
KNGSPHSKAQNQQ

SEQ ID NO: 1976 - protein, 13 aa, synthetic construct
GSGSPHSKRLEQQ

SEQ ID NO: 1977 - protein, 13 aa, synthetic construct
GSGSPHSKAQNQS

SEQ ID NO: 1978 - protein, 13 aa, synthetic construct
GSGSPHSKAQKVI

SEQ ID NO: 1979 - protein, 13 aa, synthetic construct
GSGSPHSKAQNND

SEQ ID NO: 1980 - protein, 13 aa, synthetic construct
GSGSPHSKAQSVH

SEQ ID NO: 1981 - protein, 13 aa, synthetic construct
GSGSPHSKAQPLG

SEQ ID NO: 1982 - protein, 13 aa, synthetic construct
KEGSPHSKAQNQQ

SEQ ID NO: 1983 - protein, 13 aa, synthetic construct
GSGSPHSKAHNQE

SEQ ID NO: 1984 - protein, 13 aa, synthetic construct
GSGSPHSKAQIQQ

SEQ ID NO: 1985 - protein, 13 aa, synthetic construct
GSGSPHSKAQVRN

SEQ ID NO: 1986 - protein, 13 aa, synthetic construct
GSGSPHSKAPSNQ

SEQ ID NO: 1987 - protein, 13 aa, synthetic construct
GSGSPHSKAQVGH

SEQ ID NO: 1988 - protein, 13 aa, synthetic construct
GSGSPHSKAQRDI

SEQ ID NO: 1989 - protein, 13 aa, synthetic construct
GSGSPHSKAQMPN

SEQ ID NO: 1990 - protein, 13 aa, synthetic construct
AIGSPHSKAQNQQ

SEQ ID NO: 1991 - protein, 13 aa, synthetic construct
GSGSPHSKARGLQ

SEQ ID NO: 1992 - protein, 13 aa, synthetic construct
GSGSPHSKLQKQQ

SEQ ID NO: 1993 - protein, 13 aa, synthetic construct
GSGSPHSKAPSLQ

SEQ ID NO: 1994 - protein, 13 aa, synthetic construct
GSGSPHSKAQRDQ

SEQ ID NO: 1995 - protein, 13 aa, synthetic construct
GSGSPHSKNRDQQ

SEQ ID NO: 1996 - protein, 13 aa, synthetic construct
GSGSPHSKAQAKG

SEQ ID NO: 1997 - protein, 13 aa, synthetic construct
GSGSPHSKAQSAH

SEQ ID NO: 1998 - protein, 13 aa, synthetic construct
GNGSPHSKSQNQH

SEQ ID NO: 1999 - protein, 13 aa, synthetic construct
GSGSPHSKSQNHQ

SEQ ID NO: 2000 - protein, 13 aa, synthetic construct
RSGSPHSKAQDQQ

SEQ ID NO: 2001 - DNA, 1608 bp, synthetic construct
  source 1..1608: mol_type = other DNA
atggaattctctagcccatctagagaggaatgtcctaagcctctgtcaagagtgtccatcatggctggcagcctgacaggcctgctgctgctgcaggctgtgtcctgggccagtggagccaggccctgcatccctaagtcctttggctattcttctgtggtctgtgtgtgtaatgccacttactgtgacagctttgaccctcctaccttccctgcccttggaacattcagcagatatgagagcaccagatctggcagaagaatggaactgagcatgggcccaatccaggccaaccacacaggcacaggcctcctgctgacactgcaacctgagcagaagttccagaaggtgaagggatttggaggtgccatgacagatgctgctgctctgaacatcctggccctctccccacctgctcagaacctgctgcttaaaagctacttctctgaggaaggcattggctataacatcatcagagtgcccatggccagctgtgacttcagcatcagaacatacacttatgctgatacacctgatgacttccaactgcacaacttcagtctgcctgaagaggacacaaagctgaaaatccccctgatccacagggccctccagctggcccagagacctgtgagcctgctggcctctccttggacaagccccacctggctgaagactaatggagctgtgaatggcaagggcagcctgaagggccagcctggggacatctaccaccaaacctgggctaggtactttgtcaaattcctggatgcctatgctgagcataagctgcaattttgggctgttacagctgagaatgagccttctgcaggcctgctgtctggatatcctttccagtgcctgggcttcacccctgagcaccagagagactttattgccagagatctggggccaaccctggctaacagcacacaccacaatgtgaggctgctgatgctggatgaccagaggctgctgctcccccactgggccaaggtggtgctgacagatccagaggctgccaaatatgtgcatgggattgctgtccactggtacctggatttcctggcccctgccaaggccaccctgggagaaacacatagactgtttcctaataccatgctgtttgcctctgaggcctgtgtgggcagcaagttctgggaacaatctgtgagactgggcagctgggacagaggaatgcagtacagccacagcatcattaccaacctgctgtatcatgtggtgggctggacagactggaacctggccctcaaccctgaagggggccccaactgggtgaggaactttgtggactctcctatcattgtggatattaccaaggataccttctacaagcagcctatgttctaccacctgggccacttcagcaagttcatcccagagggatctcagagggtgggccttgtggcatctcagaaaaatgacctagatgctgttgccctgatgcaccctgatgggtcagcagtggtagtggtcctgaatagaagctccaaggatgtgccactgactatcaaggacccagctgtaggatttctggaaaccatcagtcctgggtacagcatccacacttacctctggaggaggcag

SEQ ID NO: 2002 - DNA, 1491 bp, synthetic construct
  source 1..1491: mol_type = other DNA
gccaggccctgcatccctaagtcctttggctattcttctgtggtctgtgtgtgtaatgccacttactgtgacagctttgaccctcctaccttccctgcccttggaacattcagcagatatgagagcaccagatctggcagaagaatggaactgagcatgggcccaatccaggccaaccacacaggcacaggcctcctgctgacactgcaacctgagcagaagttccagaaggtgaagggatttggaggtgccatgacagatgctgctgctctgaacatcctggccctctccccacctgctcagaacctgctgcttaaaagctacttctctgaggaaggcattggctataacatcatcagagtgcccatggccagctgtgacttcagcatcagaacatacacttatgctgatacacctgatgacttccaactgcacaacttcagtctgcctgaagaggacacaaagctgaaaatccccctgatccacagggccctccagctggcccagagacctgtgagcctgctggcctctccttggacaagccccacctggctgaagactaatggagctgtgaatggcaagggcagcctgaagggccagcctggggacatctaccaccaaacctgggctaggtactttgtcaaattcctggatgcctatgctgagcataagctgcaattttgggctgttacagctgagaatgagccttctgcaggcctgctgtctggatatcctttccagtgcctgggcttcacccctgagcaccagagagactttattgccagagatctggggccaaccctggctaacagcacacaccacaatgtgaggctgctgatgctggatgaccagaggctgctgctcccccactgggccaaggtggtgctgacagatccagaggctgccaaatatgtgcatgggattgctgtccactggtacctggatttcctggcccctgccaaggccaccctgggagaaacacatagactgtttcctaataccatgctgtttgcctctgaggcctgtgtgggcagcaagttctgggaacaatctgtgagactgggcagctgggacagaggaatgcagtacagccacagcatcattaccaacctgctgtatcatgtggtgggctggacagactggaacctggccctcaaccctgaagggggccccaactgggtgaggaactttgtggactctcctatcattgtggatattaccaaggataccttctacaagcagcctatgttctaccacctgggccacttcagcaagttcatcccagagggatctcagagggtgggccttgtggcatctcagaaaaatgacctagatgctgttgccctgatgcaccctgatgggtcagcagtggtagtggtcctgaatagaagctccaaggatgtgccactgactatcaaggacccagctgtaggatttctggaaaccatcagtcctgggtacagcatccacacttacctctggaggaggcag

SEQ ID NO: 2003 - protein, 13 aa, synthetic construct
GGGSPHSKSQNRQ

SEQ ID NO: 2004 - protein, 13 aa, synthetic construct
GSGSPHSKAQYRA

SEQ ID NO: 2005 - DNA, 117 bp, synthetic construct
  source 1..117: mol_type = other DNA
atggaattctctagcccatctagagaggaatgtcctaagcctctgtcaagagtgtccatcatggctggcagcctgacaggcctgctgctgctgcaggctgtgtcctgggccagtgga

SEQ ID NO: 2006 - DNA, 3413 bp, synthetic construct
  source 1..3413: mol_type = other DNA
ctgcgcgctcgctcgctcactgaggccgcccgggcaaagcccgggcgtcgggcgacctttggtcgcccggcctcagtgagcgagcgagcgcgcagagagggagtggccaactccatcactaggggttccttgtagttaatgattaacccgccatgctacttatctaccagggtaatggggatcctctagaactatagctagtcgacattgattattgactagttattaatagtaatcaattacggggtcattagttcatagcccatatatggagttccgcgttacataacttacggtaaatggcccgcctggctgaccgcccaacgacccccgcccattgacgtcaataatgacgtatgttcccatagtaacgccaatagggactttccattgacgtcaatgggtggagtatttacggtaaactgcccacttggcagtacatcaagtgtatcatatgccaagtacgccccctattgacgtcaatgacggtaaatggcccgcctggcattatgcccagtacatgaccttatgggactttcctacttggcagtacatctacgtattagtcatcgctattaccatgtcgaggccacgttctgcttcactctccccatctcccccccctccccacccccaattttgtatttatttattttttaattattttgtgcagcgatgggggcggggggggggggcgcgcgccaggcggggcggggcggggcgaggggcggggcggggcgaggcggagaggtgcggcggcagccaatcagagcggcgcgctccgaaagtttccttttatggcgaggcggcggcggcggcggccctataaaaagcgaagcgcgcggcgggcgggagcaagcttcgtttagtgaaccgtcagatcgcctggagacgccatccacgctgttttgacctccatagaagacaccgggaccgatccagcctccgcggattcgaatcccggccgggaacggtgcattggaacgcggattccccgtgccaagagtgacgtaagtaccgcctatagagtctataggcccacaaaaaatgctttcttcttttaatatacttttttgtttatcttatttctaatactttccctaatctctttctttcagggcaataatgatacaatgtatcatgcctctttgcaccattctaaagaataacagtgataatttctgggttaaggcaatagcaatatttctgcatataaatatttctgcatataaattgtaactgatgtaagaggtttcatattgctaatagcagctacaatccagctaccattctgcttttattttatggttgggataaggctggattattctgagtccaagctaggcccttttgctaatcatgttcatacctcttatcttcctcccacagctcctgggcaacgtgctggtctgtgtgctggcccatcactttggcaaagaattgggattcgaaccggtgccgccaccatggaattctctagcccatctagagaggaatgtcctaagcctctgtcaagagtgtccatcatggctggcagcctgacaggcctgctgctgctgcaggctgtgtcctgggccagtggagccaggccctgcatccctaagtcctttggctattcttctgtggtctgtgtgtgtaatgccacttactgtgacagctttgaccctcctaccttccctgcccttggaacattcagcagatatgagagcaccagatctggcagaagaatggaactgagcatgggcccaatccaggccaaccacacaggcacaggcctcctgctgacactgcaacctgagcagaagttccagaaggtgaagggatttggaggtgccatgacagatgctgctgctctgaacatcctggccctctccccacctgctcagaacctgctgcttaaaagctacttctctgaggaaggcattggctataacatcatcagagtgcccatggccagctgtgacttcagcatcagaacatacacttatgctgatacacctgatgacttccaactgcacaacttcagtctgcctgaagaggacacaaagctgaaaatccccctgatccacagggccctccagctggcccagagacctgtgagcctgctggcctctccttggacaagccccacctggctgaagactaatggagctgtgaatggcaagggcagcctgaagggccagcctggggacatctaccaccaaacctgggctaggtactttgtcaaattcctggatgcctatgctgagcataagctgcaattttgggctgttacagctgagaatgagccttctgcaggcctgctgtctggatatcctttccagtgcctgggcttcacccctgagcaccagagagactttattgccagagatctggggccaaccctggctaacagcacacaccacaatgtgaggctgctgatgctggatgaccagaggctgctgctcccccactgggccaaggtggtgctgacagatccagaggctgccaaatatgtgcatgggattgctgtccactggtacctggatttcctggcccctgccaaggccaccctgggagaaacacatagactgtttcctaataccatgctgtttgcctctgaggcctgtgtgggcagcaagttctgggaacaatctgtgagactgggcagctgggacagaggaatgcagtacagccacagcatcattaccaacctgctgtatcatgtggtgggctggacagactggaacctggccctcaaccctgaagggggccccaactgggtgaggaactttgtggactctcctatcattgtggatattaccaaggataccttctacaagcagcctatgttctaccacctgggccacttcagcaagttcatcccagagggatctcagagggtgggccttgtggcatctcagaaaaatgacctagatgctgttgccctgatgcaccctgatgggtcagcagtggtagtggtcctgaatagaagctccaaggatgtgccactgactatcaaggacccagctgtaggatttctggaaaccatcagtcctgggtacagcatccacacttacctctggaggaggcagtagtaactcgaggacggggtgaactacgcctgaggatccgatctttttccctctgccaaaaattatggggacatcatgaagccccttgagcatctgacttctggctaataaaggaaatttattttcattgcaatagtgtgttggaattttttgtgtctctcactcggcctaggtagataagtagcatggcgggttaatcattaactacaaggaacccctagtgatggagttggccactccctctctgcgcgctcgctcgctcactgaggccgggcgaccaaaggtcgcccgacgcccgggctttgcccgggcggcctcagtgagcgagcgagcgcgcag

SEQ ID NO: 2007 - DNA, 3571 bp, synthetic construct
  source 1..3571: mol_type = other DNA
ctgcgcgctcgctcgctcactgaggccgcccgggcaaagcccgggcgtcgggcgacctttggtcgcccggcctcagtgagcgagcgagcgcgcagagagggagtggccaactccatcactaggggttccttgtagttaatgattaacccgccatgctacttatctaccagggtaatggggatcctctagaactatagctagtcgacattgattattgactagttattaatagtaatcaattacggggtcattagttcatagcccatatatggagttccgcgttacataacttacggtaaatggcccgcctggctgaccgcccaacgacccccgcccattgacgtcaataatgacgtatgttcccatagtaacgccaatagggactttccattgacgtcaatgggtggagtatttacggtaaactgcccacttggcagtacatcaagtgtatcatatgccaagtacgccccctattgacgtcaatgacggtaaatggcccgcctggcattatgcccagtacatgaccttatgggactttcctacttggcagtacatctacgtattagtcatcgctattaccatgtcgaggccacgttctgcttcactctccccatctcccccccctccccacccccaattttgtatttatttattttttaattattttgtgcagcgatgggggcggggggggggggcgcgcgccaggcggggcggggcggggcgaggggcggggcggggcgaggcggagaggtgcggcggcagccaatcagagcggcgcgctccgaaagtttccttttatggcgaggcggcggcggcggcggccctataaaaagcgaagcgcgcggcgggcgggagcaagcttcgtttagtgaaccgtcagatcgcctggagacgccatccacgctgttttgacctccatagaagacaccgggaccgatccagcctccgcggattcgaatcccggccgggaacggtgcattggaacgcggattccccgtgccaagagtgacgtaagtaccgcctatagagtctataggcccacaaaaaatgctttcttcttttaatatacttttttgtttatcttatttctaatactttccctaatctctttctttcagggcaataatgatacaatgtatcatgcctctttgcaccattctaaagaataacagtgataatttctgggttaaggcaatagcaatatttctgcatataaatatttctgcatataaattgtaactgatgtaagaggtttcatattgctaatagcagctacaatccagctaccattctgcttttattttatggttgggataaggctggattattctgagtccaagctaggcccttttgctaatcatgttcatacctcttatcttcctcccacagctcctgggcaacgtgctggtctgtgtgctggcccatcactttggcaaagaattgggattcgaaccggtgccgccaccatggaattctctagcccatctagagaggaatgtcctaagcctctgtcaagagtgtccatcatggctggcagcctgacaggcctgctgctgctgcaggctgtgtcctgggccagtggagccaggccctgcatccctaagtcctttggctattcttctgtggtctgtgtgtgtaatgccacttactgtgacagctttgaccctcctaccttccctgcccttggaacattcagcagatatgagagcaccagatctggcagaagaatggaactgagcatgggcccaatccaggccaaccacacaggcacaggcctcctgctgacactgcaacctgagcagaagttccagaaggtgaagggatttggaggtgccatgacagatgctgctgctctgaacatcctggccctctccccacctgctcagaacctgctgcttaaaagctacttctctgaggaaggcattggctataacatcatcagagtgcccatggccagctgtgacttcagcatcagaacatacacttatgctgatacacctgatgacttccaactgcacaacttcagtctgcctgaagaggacacaaagctgaaaatccccctgatccacagggccctccagctggcccagagacctgtgagcctgctggcctctccttggacaagccccacctggctgaagactaatggagctgtgaatggcaagggcagcctgaagggccagcctggggacatctaccaccaaacctgggctaggtactttgtcaaattcctggatgcctatgctgagcataagctgcaattttgggctgttacagctgagaatgagccttctgcaggcctgctgtctggatatcctttccagtgcctgggcttcacccctgagcaccagagagactttattgccagagatctggggccaaccctggctaacagcacacaccacaatgtgaggctgctgatgctggatgaccagaggctgctgctcccccactgggccaaggtggtgctgacagatccagaggctgccaaatatgtgcatgggattgctgtccactggtacctggatttcctggcccctgccaaggccaccctgggagaaacacatagactgtttcctaataccatgctgtttgcctctgaggcctgtgtgggcagcaagttctgggaacaatctgtgagactgggcagctgggacagaggaatgcagtacagccacagcatcattaccaacctgctgtatcatgtggtgggctggacagactggaacctggccctcaaccctgaagggggccccaactgggtgaggaactttgtggactctcctatcattgtggatattaccaaggataccttctacaagcagcctatgttctaccacctgggccacttcagcaagttcatcccagagggatctcagagggtgggccttgtggcatctcagaaaaatgacctagatgctgttgccctgatgcaccctgatgggtcagcagtggtagtggtcctgaatagaagctccaaggatgtgccactgactatcaaggacccagctgtaggatttctggaaaccatcagtcctgggtacagcatccacacttacctctggaggaggcagtagtaacctcgaggtaccaggagctcttctcctagtgaattctaccagtgccatagatagttaagtgaattctaccagtgccatagatagttaagtgaattctaccagtgccatagatagttaagtgaattctaccagtgccatactgcagtcaggtctataccatcgaggacggggtgaactacgcctgaggatccgatctttttccctctgccaaaaattatggggacatcatgaagccccttgagcatctgacttctggctaataaaggaaatttattttcattgcaatagtgtgttggaattttttgtgtctctcactcggcctaggtagataagtagcatggcgggttaatcattaactacaaggaacccctagtgatggagttggccactccctctctgcgcgctcgctcgctcactgaggccgggcgaccaaaggtcgcccgacgcccgggctttgcccgggcggcctcagtgagcgagcgagcgcgcag

SEQ ID NO: 2008 - protein, 13 aa, synthetic construct
GSGSPHAKAQNHQ

SEQ ID NO: 2009 - protein, 13 aa, synthetic construct
GSGSPHSKAGDSQ

SEQ ID NO: 2010 - protein, 13 aa, synthetic construct
GSGSPHSKLKSQQ

SEQ ID NO: 2011 - protein, 13 aa, synthetic construct
GSGSPHSKAQKIS

SEQ ID NO: 2012 - protein, 13 aa, synthetic construct
GSGSPHSKAPSMQ

SEQ ID NO: 2013 - protein, 13 aa, synthetic construct
GSGSPHSKASPRQ

SEQ ID NO: 2014 - protein, 13 aa, synthetic construct
GSGSPHSKRMEQQ

SEQ ID NO: 2015 - protein, 13 aa, synthetic construct
GSGSPHSKAQYQN

SEQ ID NO: 2016 - protein, 13 aa, synthetic construct
GSGSPHARMQNQQ

SEQ ID NO: 2017 - protein, 13 aa, synthetic construct
GSGSPHVKSQNQQ

SEQ ID NO: 2018 - protein, 13 aa, synthetic construct
GQDSPHKSGQNQQ

SEQ ID NO: 2019 - protein, 13 aa, synthetic construct
GSGSPHASRQNQQ

SEQ ID NO: 2020 - protein, 13 aa, synthetic construct
GSGSPHASRQNKQ

SEQ ID NO: 2021 - protein, 13 aa, synthetic construct
GSGSPHVKIQNQQ

SEQ ID NO: 2022 - protein, 13 aa, synthetic construct
GSGSPHSKAKNQQ

SEQ ID NO: 2023 - protein, 13 aa, synthetic construct
GSGSPHKKNQNQQ

SEQ ID NO: 2024 - protein, 13 aa, synthetic construct
GSGSPHVRMQNQQ

SEQ ID NO: 2025 - protein, 13 aa, synthetic construct
GSGSPHASRQKQQ

SEQ ID NO: 2026 - protein, 13 aa, synthetic construct
GHSSPHRSGQNQQ

SEQ ID NO: 2027 - protein, 13 aa, synthetic construct
GSGSPHTRGQNQQ

SEQ ID NO: 2028 - protein, 13 aa, synthetic construct
CSGSPHSKAQNQQ

SEQ ID NO: 2029 - protein, 13 aa, synthetic construct
GSGSPHRKAQNQQ

SEQ ID NO: 2030 - protein, 13 aa, synthetic construct
GSGSPHSKAQNKQ

SEQ ID NO: 2031 - protein, 13 aa, synthetic construct
GSGSPHSKAQTQQ

SEQ ID NO: 2032 - protein, 13 aa, synthetic construct
CSGSPHKTSQNQQ

SEQ ID NO: 2033 - protein, 13 aa, synthetic construct
CSHSPHKSGQNQQ

SEQ ID NO: 2034 - protein, 13 aa, synthetic construct
GQSSPHRSGQNQQ

SEQ ID NO: 2035 - protein, 13 aa, synthetic construct
GRGSPHASRQNQQ

SEQ ID NO: 2036 - protein, 13 aa, synthetic construct
GSGSPHASRKNQQ

SEQ ID NO: 2037 - protein, 13 aa, synthetic construct
GSGSPHASRQNQH

SEQ ID NO: 2038 - protein, 13 aa, synthetic construct
GSGSPHKFGKNQQ

SEQ ID NO: 2039 - protein, 13 aa, synthetic construct
GSGSPHKFGQKQQ

SEQ ID NO: 2040 - protein, 13 aa, synthetic construct
GSGSPHKFGQNQQ

SEQ ID NO: 2041 - protein, 13 aa, synthetic construct
GSGSPHKIGQNQQ

SEQ ID NO: 2042 - protein, 13 aa, synthetic construct
GSGSPHKLGQNQQ

SEQ ID NO: 2043 - protein, 13 aa, synthetic construct
GSGSPHKTSKNQQ

SEQ ID NO: 2044 - protein, 13 aa, synthetic construct
GSGSPHKTSQKQQ

SEQ ID NO: 2045 - protein, 13 aa, synthetic construct
GSGSPHKTSQNQQ

SEQ ID NO: 2046 - protein, 13 aa, synthetic construct
GSGSPHKTTQNQQ

SEQ ID NO: 2047 - protein, 13 aa, synthetic construct
GSGSPHKTYQNQQ

SEQ ID NO: 2048 - protein, 13 aa, synthetic construct
GSGSPHKYGQNQQ

SEQ ID NO: 2049 - protein, 13 aa, synthetic construct
GSGSPHSKAQHQQ

SEQ ID NO: 2050 - protein, 13 aa, synthetic construct
GSGSPHSKDQNQQ

SEQ ID NO: 2051 - protein, 13 aa, synthetic construct
GSGSPHSKPQNQQ

SEQ ID NO: 2052 - protein, 13 aa, synthetic construct
GSGSPHVRGQKQQ

SEQ ID NO: 2053 - protein, 13 aa, synthetic construct
GSGSPHVRGQNKQ

SEQ ID NO: 2054 - protein, 13 aa, synthetic construct
GSHSPHKRGQNQQ

SEQ ID NO: 2055 - protein, 13 aa, synthetic construct
GSHSPHKSGQKQQ

SEQ ID NO: 2056 - protein, 13 aa, synthetic construct
GSHSPHKSGQNQQ

SEQ ID NO: 2057 - protein, 13 aa, synthetic construct
VSGSPHASRQNQQ

SEQ ID NO: 2058 - protein, 13 aa, synthetic construct
VSGSPHGARQNQQ

SEQ ID NO: 2059 - protein, 13 aa, synthetic construct
VSGSPHKFGQNQQ

SEQ ID NO: 2060 - protein, 13 aa, synthetic construct
GSGSPHSKAQYYV

SEQ ID NO: 2061 - protein, 13 aa, synthetic construct
GSGSPHSKLRRQQ

SEQ ID NO: 2062 - protein, 13 aa, synthetic construct
GSGSPHSKAGCGQ

SEQ ID NO: 2063 - protein, 13 aa, synthetic construct
GSGSPHSRAQNQQ

SEQ ID NO: 2064 - protein, 13 aa, synthetic construct
GSGSPHSKRLRQQ

SEQ ID NO: 2065 - protein, 13 aa, synthetic construct
GSGSPHSLRRNQQ

SEQ ID NO: 2066 - protein, 13 aa, synthetic construct
GSGSPHSRGRNQQ

SEQ ID NO: 2067 - protein, 13 aa, synthetic construct
GSGSPHSSRRNQQ

SEQ ID NO: 2068 - protein, 13 aa, synthetic construct
GSGSPHSKAFRLQ

SEQ ID NO: 2069 - protein, 13 aa, synthetic construct
GSCSPHRKAQNQQ

SEQ ID NO: 2070 - protein, 13 aa, synthetic construct
GSGSPHFLRQNQQ

SEQ ID NO: 2071 - protein, 13 aa, synthetic construct
GSGSPHSLRFNQQ

SEQ ID NO: 2072 - protein, 13 aa, synthetic construct
GSGSPHSKWLLQQ

SEQ ID NO: 2073 - protein, 13 aa, synthetic construct
GSGSPHSKRRLQQ

SEQ ID NO: 2074 - protein, 13 aa, synthetic construct
GSGSPHSKAQRKL

SEQ ID NO: 2075 - protein, 13 aa, synthetic construct
GSGSPHSKALRRQ

SEQ ID NO: 2076 - protein, 13 aa, synthetic construct
GSGSPHSKAQRLR

SEQ ID NO: 2077 - protein, 13 aa, synthetic construct
GSGSPHSKAQRRL

SEQ ID NO: 2078 - protein, 13 aa, synthetic construct
GSGSPHSKARRQQ

SEQ ID NO: 2079 - protein, 13 aa, synthetic construct
GSGSPHSKARRLQ

SEQ ID NO: 2080 - protein, 13 aa, synthetic construct
GSGSPHSKSRRQQ

SEQ ID NO: 2081 - protein, 13 aa, synthetic construct
GLLSPHWKAQNQQ

SEQ ID NO: 2082 - protein, 13 aa, synthetic construct
GSGSPHSKARLRQ

SEQ ID NO: 2083 - protein, 13 aa, synthetic construct
GSGSPHSKASKRQ

SEQ ID NO: 2084 - protein, 13 aa, synthetic construct
GSGSPHVRRQNQQ

SEQ ID NO: 2085 - protein, 13 aa, synthetic construct
GSGSPHSKAQLYR

SEQ ID NO: 2086 - protein, 13 aa, synthetic construct
GSGSPHSKAQLTV

SEQ ID NO: 2087 - protein, 13 aa, synthetic construct
GHDSPHKRGQHRQ

SEQ ID NO: 2088 - protein, 13 aa, synthetic construct
GHDSPHKSGQKQQ

SEQ ID NO: 2089 - protein, 13 aa, synthetic construct
GHDSPHKSGLTQQ

SEQ ID NO: 2090 - protein, 13 aa, synthetic construct
GDDSPHKSGRNQQ

SEQ ID NO: 2091 - protein, 13 aa, synthetic construct
GHDSPHKSGLNQQ

SEQ ID NO: 2092 - protein, 13 aa, synthetic construct
GHESPHKSAQNHQ

SEQ ID NO: 2093 - protein, 13 aa, synthetic construct
GHDSPHKSAQNQW

SEQ ID NO: 2094 - protein, 13 aa, synthetic construct
GHDSPHKSGQNTH

SEQ ID NO: 2095 - protein, 13 aa, synthetic construct
GHDSPHKSGRRRQ

SEQ ID NO: 2096 - protein, 13 aa, synthetic construct
GHDSPHKSAQNQQ

SEQ ID NO: 2097 - protein, 13 aa, synthetic construct
GHDSPHKSGQYQQ

SEQ ID NO: 2098 - protein, 13 aa, synthetic construct
GNYSPHKIGQNQQ

SEQ ID NO: 2099 - protein, 13 aa, synthetic construct
GHDSPHKSRQNDQ

SEQ ID NO: 2100 - protein, 13 aa, synthetic construct
GHDSPHKSGQIRQ

SEQ ID NO: 2101 - protein, 13 aa, synthetic construct
GHDSPHKIGQNQH

SEQ ID NO: 2102 - protein, 13 aa, synthetic construct
GYDSPHKSGQKQQ

SEQ ID NO: 2103 - protein, 13 aa, synthetic construct
GHDSPHKSGQSVQ

SEQ ID NO: 2104 - protein, 13 aa, synthetic construct
GHESPHKSGRSQQ

SEQ ID NO: 2105 - protein, 13 aa, synthetic construct
GHDSPHKSGQNKL

SEQ ID NO: 2106 - protein, 13 aa, synthetic construct
GHDSPHKTGQNQQ

SEQ ID NO: 2107 - protein, 13 aa, synthetic construct
GRGSPHKRGQNQQ

SEQ ID NO: 2108 - protein, 13 aa, synthetic construct
GSGSPHTKAQNPP

SEQ ID NO: 2109 - protein, 13 aa, synthetic construct
GQDSPHKSGQHQQ

SEQ ID NO: 2110 - protein, 13 aa, synthetic construct
GHDSPHKSGQIQH

SEQ ID NO: 2111 - protein, 13 aa, synthetic construct
GHDSPHKSGPRQQ

SEQ ID NO: 2112 - protein, 13 aa, synthetic construct
GHDSPHKSGHTQQ

SEQ ID NO: 2113 - protein, 13 aa, synthetic construct
GHDSPHKSGQRQH

SEQ ID NO: 2114 - protein, 13 aa, synthetic construct
GSGSPHTKAQNQQ

SEQ ID NO: 2115 - protein, 13 aa, synthetic construct
GHDSPHKSAQSQQ

SEQ ID NO: 2116 - protein, 13 aa, synthetic construct
GHESPHKSGQNQQ

SEQ ID NO: 2117 - protein, 13 aa, synthetic construct
GHDSPHKSLQNQQ

SEQ ID NO: 2118 - protein, 13 aa, synthetic construct
GHGSPHSKAQNPQ

SEQ ID NO: 2119 - protein, 13 aa, synthetic construct
GHDSPHKSGRNQE

SEQ ID NO: 2120 - protein, 13 aa, synthetic construct
GHDSPHKSGQTQL

SEQ ID NO: 2121 - protein, 13 aa, synthetic construct
GHDSPHKSEKNQQ

SEQ ID NO: 2122 - protein, 13 aa, synthetic construct
GRDSPHKSGQDQQ

SEQ ID NO: 2123 - protein, 13 aa, synthetic construct
GHDSPHKTGHNQQ

SEQ ID NO: 2124 - protein, 13 aa, synthetic construct
GYDSPHKSGQTQQ

SEQ ID NO: 2125 - protein, 13 aa, synthetic construct
GHESPHKSGQTQQ

SEQ ID NO: 2126 - protein, 13 aa, synthetic construct
GHDSPHKSGQSKQ

SEQ ID NO: 2127 - protein, 13 aa, synthetic construct
GHDSPHKTGQNQP

SEQ ID NO: 2128 - protein, 13 aa, synthetic construct
GHDSPHKSGQSPQ

SEQ ID NO: 2129 - protein, 13 aa, synthetic construct
GNDSPHKSVQNQQ

SEQ ID NO: 2130 - protein, 13 aa, synthetic construct
GHDSPHKSAQNYQ

SEQ ID NO: 2131 - protein, 13 aa, synthetic construct
GSASPHSKALNQQ

SEQ ID NO: 2132 - protein, 13 aa, synthetic construct
GHESPHKSAQNRQ

SEQ ID NO: 2133 - protein, 13 aa, synthetic construct
GQDSPHKIGQNQQ

SEQ ID NO: 2134 - protein, 13 aa, synthetic construct
GHDSPHKSGQNHL

SEQ ID NO: 2135 - protein, 13 aa, synthetic construct
GHDSPHKSGQYQH

SEQ ID NO: 2136 - protein, 13 aa, synthetic construct
GNDSPHKSVQNHQ

SEQ ID NO: 2137 - protein, 13 aa, synthetic construct
GHDSPHKSGQNQW

SEQ ID NO: 2138 - protein, 13 aa, synthetic construct
GHDSPHKSVQNQH

SEQ ID NO: 2139 - protein, 13 aa, synthetic construct
GHDSPHKSGQNQH

SEQ ID NO: 2140 - protein, 13 aa, synthetic construct
GHDSPHKSGQTRQ

SEQ ID NO: 2141 - protein, 13 aa, synthetic construct
GHDSPHKSGQNLH

SEQ ID NO: 2142 - protein, 13 aa, synthetic construct
GHDSPHKSAQNQE

SEQ ID NO: 2143 - protein, 13 aa, synthetic construct
GHDSPHKSGQHLQ

SEQ ID NO: 2144 - protein, 13 aa, synthetic construct
GHDSPHKSRLNQP

SEQ ID NO: 2145 - protein, 13 aa, synthetic construct
GQDSPHKSGQNQD

SEQ ID NO: 2146 - protein, 13 aa, synthetic construct
GHDSPHKSGRNQQ

SEQ ID NO: 2147 - protein, 13 aa, synthetic construct
GHDSPHKSGQNLL

SEQ ID NO: 2148 - protein, 13 aa, synthetic construct
GHDSPHKSGQLVI

SEQ ID NO: 2149 - protein, 13 aa, synthetic construct
GHDSPHKSRQSQQ

SEQ ID NO: 2150 - protein, 13 aa, synthetic construct
GHDSPHKSGRTQE

SEQ ID NO: 2151 - protein, 13 aa, synthetic construct
GHDSPHKSVQTHQ

SEQ ID NO: 2152 - protein, 13 aa, synthetic construct
GHDSPHKSGQNQP

SEQ ID NO: 2153 - protein, 13 aa, synthetic construct
GHDSPHKSGQTQQ

SEQ ID NO: 2154 - protein, 13 aa, synthetic construct
GPDSPHKIGQNQQ

SEQ ID NO: 2155 - protein, 13 aa, synthetic construct
GHDSPHKSVQNQQ

SEQ ID NO: 2156 - protein, 13 aa, synthetic construct
GHDSPHKSRQDQH

SEQ ID NO: 2157 - protein, 13 aa, synthetic construct
GPDSPHKSGQKQQ

SEQ ID NO: 2158 - protein, 13 aa, synthetic construct
GHDSPHKSRQSQH

SEQ ID NO: 2159 - protein, 13 aa, synthetic construct
GHDSPHKSVQNQL

SEQ ID NO: 2160 - protein, 13 aa, synthetic construct
GYDSPHKSGQYQH

SEQ ID NO: 2161 - protein, 13 aa, synthetic construct
GHDSPHKSRQNQQ

SEQ ID NO: 2162 - protein, 13 aa, synthetic construct
GHDSPHKSWVRQQ

SEQ ID NO: 2163 - protein, 13 aa, synthetic construct
GHESPHKSGQNQH

SEQ ID NO: 2164 - protein, 13 aa, synthetic construct
GHDSPHKIGHNQQ

SEQ ID NO: 2165 - protein, 13 aa, synthetic construct
GHDSPHKSNAWQQ

SEQ ID NO: 2166 - protein, 13 aa, synthetic construct
GHDSPHKSGQSVP

SEQ ID NO: 2167 - protein, 13 aa, synthetic construct
GHESPHKSGQNIQ

SEQ ID NO: 2168 - protein, 13 aa, synthetic construct
GHDSPHKSVQNHL

SEQ ID NO: 2169 - protein, 13 aa, synthetic construct
GHDSPHKIGLDQQ

SEQ ID NO: 2170 - protein, 13 aa, synthetic construct
ASGSPHSKAQHQQ

SEQ ID NO: 2171 - protein, 13 aa, synthetic construct
GHDSPHKRGPDQQ

SEQ ID NO: 2172 - protein, 13 aa, synthetic construct
GMGSPHSKTQNQQ

SEQ ID NO: 2173 - protein, 13 aa, synthetic construct
GHDSPHKSGESQQ

SEQ ID NO: 2174 - protein, 13 aa, synthetic construct
GHDSPHKHGQNHQ

SEQ ID NO: 2175 - protein, 13 aa, synthetic construct
GTGSPHSKAQNQL

SEQ ID NO: 2176 - protein, 13 aa, synthetic construct
GHDSPHKSVQNKQ

SEQ ID NO: 2177 - protein, 13 aa, synthetic construct
GQVSPHKSGQNQQ

SEQ ID NO: 2178 - protein, 13 aa, synthetic construct
GHDSPHKSGQRQL

SEQ ID NO: 2179 - protein, 13 aa, synthetic construct
GHDSPHKIGQNQL

SEQ ID NO: 2180 - protein, 13 aa, synthetic construct
GHDSPHKSGQIIV

SEQ ID NO: 2181 - protein, 13 aa, synthetic construct
GYDSPHKSGQKQS

SEQ ID NO: 2182 - protein, 13 aa, synthetic construct
GNGSPHSKAQNQE

SEQ ID NO: 2183 - protein, 13 aa, synthetic construct
GDDSPHKSVQNQQ

SEQ ID NO: 2184 - protein, 13 aa, synthetic construct
GHDSPHKSVQSHQ

SEQ ID NO: 2185 - protein, 13 aa, synthetic construct
GHDSPHKSGQFVV

SEQ ID NO: 2186 - protein, 13 aa, synthetic construct
GHDSPHKSRQNLQ

SEQ ID NO: 2187 - protein, 13 aa, synthetic construct
GHNSPHKSGQNQE

SEQ ID NO: 2188 - protein, 13 aa, synthetic construct
GHDSPHKSGQSQP

SEQ ID NO: 2189 - protein, 13 aa, synthetic construct
GHESPHKSGQNEQ

SEQ ID NO: 2190 - protein, 13 aa, synthetic construct
GHDSPHKSGQNQL

SEQ ID NO: 2191 - protein, 13 aa, synthetic construct
GHDSPHKSAQNLL

SEQ ID NO: 2192 - protein, 13 aa, synthetic construct
ASGSPHSKAINQQ

SEQ ID NO: 2193 - protein, 13 aa, synthetic construct
GNGSPHKRGQNQQ

SEQ ID NO: 2194 - protein, 13 aa, synthetic construct
GHDSPHKSGQSLQ

SEQ ID NO: 2195 - protein, 13 aa, synthetic construct
GHDSPHKSAQNHQ

SEQ ID NO: 2196 - protein, 13 aa, synthetic construct
GHDSPHKSGRNRQ

SEQ ID NO: 2197 - protein, 13 aa, synthetic construct
GHDSPHKYGQNEQ

SEQ ID NO: 2198 - protein, 13 aa, synthetic construct
GNGSPHSKAPNLQ

SEQ ID NO: 2199 - protein, 13 aa, synthetic construct
GHDSPHKSQQNQQ

SEQ ID NO: 2200 - protein, 13 aa, synthetic construct
GHDSPHKSVQSKQ

SEQ ID NO: 2201 - protein, 13 aa, synthetic construct
GNDSPHKIGHNQQ

SEQ ID NO: 2202 - protein, 13 aa, synthetic construct
GGGSPHSKAQDQQ

SEQ ID NO: 2203 - protein, 13 aa, synthetic construct
GQDSPHKSGQNPL

SEQ ID NO: 2204 - protein, 13 aa, synthetic construct
ASGSPHSKAQNHQ

SEQ ID NO: 2205 - protein, 13 aa, synthetic construct
GHDSPHKSGRDQK

SEQ ID NO: 2206 - protein, 13 aa, synthetic construct
GHDSPHKSVHNQQ

SEQ ID NO: 2207 - protein, 13 aa, synthetic construct
GHDSPHKSGQWKR

SEQ ID NO: 2208 - protein, 13 aa, synthetic construct
GSGSPHSKAENRQ

SEQ ID NO: 2209 - protein, 13 aa, synthetic construct
GHDSPHKSGQSQQ

SEQ ID NO: 2210 - protein, 13 aa, synthetic construct
GHDSPHKSRQAQQ

SEQ ID NO: 2211 - protein, 13 aa, synthetic construct
GHDSPHKSVQNHQ

SEQ ID NO: 2212 - protein, 13 aa, synthetic construct
GHDSPHKSKQNQQ

SEQ ID NO: 2213 - protein, 13 aa, synthetic construct
GHDSPHKSAQNQL

SEQ ID NO: 2214 - protein, 13 aa, synthetic construct
GHDSPHKSGQTQP

SEQ ID NO: 2215 - protein, 13 aa, synthetic construct
GHDSPHKLWINQQ

SEQ ID NO: 2216 - protein, 13 aa, synthetic construct
GPDSPHKSGQNQQ

SEQ ID NO: 2217 - protein, 13 aa, synthetic construct
GHDSPHKSVQKQL

SEQ ID NO: 2218 - protein, 13 aa, synthetic construct
GHPSPHWKGQNQQ

SEQ ID NO: 2219 - protein, 13 aa, synthetic construct
GHDSPHKSGRNQL

SEQ ID NO: 2220 - protein, 13 aa, synthetic construct
GSGSPHSKVQDQQ

SEQ ID NO: 2221 - protein, 13 aa, synthetic construct
GHDSPHKMGRNQQ

SEQ ID NO: 2222 - protein, 13 aa, synthetic construct
GHDSPHKSGISIQ

SEQ ID NO: 2223 - protein, 13 aa, synthetic construct
GHDSPHKSVQNLQ

SEQ ID NO: 2224 - protein, 13 aa, synthetic construct
GHDSPHKMAHNQQ

SEQ ID NO: 2225 - protein, 13 aa, synthetic construct
GHDSPHKHGQNQQ

SEQ ID NO: 2226 - protein, 13 aa, synthetic construct
GHDSPHKSVQSQQ

SEQ ID NO: 2227 - protein, 13 aa, synthetic construct
GHDSPHKSGQTVC

SEQ ID NO: 2228 - protein, 13 aa, synthetic construct
GQDSPHKSGQYQQ

SEQ ID NO: 2229 - protein, 13 aa, synthetic construct
GHDSPHKSGQQIM

SEQ ID NO: 2230 - protein, 13 aa, synthetic construct
GHDSPHKSRQNEQ

SEQ ID NO: 2231 - protein, 13 aa, synthetic construct
GHDSPHKSGLNHQ

SEQ ID NO: 2232 - protein, 13 aa, synthetic construct
GYDSPHKSGQNQQ

SEQ ID NO: 2233 - protein, 13 aa, synthetic construct
GHDSPHKSGQNLQ

SEQ ID NO: 2234 - protein, 13 aa, synthetic construct
GHDSPHKSRQDQQ

SEQ ID NO: 2235 - protein, 13 aa, synthetic construct
GDDSPHKSGQKQL

SEQ ID NO: 2236 - protein, 13 aa, synthetic construct
GSGSPHSKAQNQA

SEQ ID NO: 2237 - protein, 13 aa, synthetic construct
GDDSPHKSGHNQQ

SEQ ID NO: 2238 - protein, 13 aa, synthetic construct
GHDSPHKSGQMIH

SEQ ID NO: 2239 - protein, 13 aa, synthetic construct
GHDSPHKSGRNHQ

SEQ ID NO: 2240 - protein, 13 aa, synthetic construct
GHDSPHKSVQNRQ

SEQ ID NO: 2241 - protein, 13 aa, synthetic construct
GHDSPHKSGQKMN

SEQ ID NO: 2242 - protein, 16 aa, synthetic construct
TINGSGSPHSKAQNQQ

SEQ ID NO: 2243 - protein, 16 aa, synthetic construct
TINGHDSPHKSGQNQQ

SEQ ID NO: 2244 - protein, 16 aa, synthetic construct
TIIGSGSPHSKAQNRH

SEQ ID NO: 2245 - protein, 16 aa, synthetic construct
TFPGSGSPHSKVQNQQ

SEQ ID NO: 2246 - protein, 16 aa, synthetic construct
TEKMSGSPHSKAQNQQ

SEQ ID NO: 2247 - protein, 16 aa, synthetic construct
EINGRGSPHSKAQNQQ

SEQ ID NO: 2248 - protein, 16 aa, synthetic construct
TVNRNGSPHSKAQNQQ

SEQ ID NO: 2249 - protein, 16 aa, synthetic construct
TVNGSGSPHSKARDQQ

SEQ ID NO: 2250 - protein, 16 aa, synthetic construct
TFNGSGSPHSKAPNLQ

SEQ ID NO: 2251 - protein, 16 aa, synthetic construct
TEKTSGSPHSKAQNQQ

SEQ ID NO: 2252 - protein, 16 aa, synthetic construct
TINGSGSPHSKAHVRQ

SEQ ID NO: 2253 - protein, 16 aa, synthetic construct
TVNGSGSPHSKAPNQH

SEQ ID NO: 2254 - protein, 16 aa, synthetic construct
TEKISGSPHSKAQNQQ

SEQ ID NO: 2255 - protein, 16 aa, synthetic construct
TINGPGSPHSKAHNQQ

SEQ ID NO: 2256 - protein, 16 aa, synthetic construct
TVNGSGSPHSKTQSQQ

SEQ ID NO: 2257 - protein, 16 aa, synthetic construct
SINESGSPHSKAQNQQ

SEQ ID NO: 2258 - protein, 16 aa, synthetic construct
TERTSGSPHSKAQNQQ

SEQ ID NO: 2259 - protein, 16 aa, synthetic construct
TINGSGSPHSKAQPAK

SEQ ID NO: 2260 - protein, 16 aa, synthetic construct
TEKSSGSPHSKAQNQQ

SEQ ID NO: 2261 - protein, 16 aa, synthetic construct
TSYGNGSPHSKAQNQQ

SEQ ID NO: 2262 - protein, 16 aa, synthetic construct
TEKGSGSPHSKAQNQQ

SEQ ID NO: 2263 - protein, 16 aa, synthetic construct
TINGSGSPHSKSQTQQ

SEQ ID NO: 2264 - protein, 16 aa, synthetic construct
TERISGSPHSKAQNQQ

SEQ ID NO: 2265 - protein, 16 aa, synthetic construct
TERASGSPHSKAQNQQ

SEQ ID NO: 2266 - protein, 16 aa, synthetic construct
ELHGSGSPHSKAQNQQ

SEQ ID NO: 2267 - protein, 16 aa, synthetic construct
AINGSGSPHSKAQNLA

SEQ ID NO: 2268 - protein, 16 aa, synthetic construct
TVNGSGSPHSKSQNQL

SEQ ID NO: 2269 - protein, 16 aa, synthetic construct
TERNSGSPHSKAQNQQ

SEQ ID NO: 2270 - protein, 16 aa, synthetic construct
SVNGNGSPHSKAQNQQ

SEQ ID NO: 2271 - protein, 16 aa, synthetic construct
TFNGSGSPHSKAQGQQ

SEQ ID NO: 2272 - protein, 16 aa, synthetic construct
TERVSGSPHSKAQNQQ

SEQ ID NO: 2273 - protein, 16 aa, synthetic construct
TINGSGSPHSKALNRQ

SEQ ID NO: 2274 - protein, 16 aa, synthetic construct
TERLSGSPHSKAQNQQ

SEQ ID NO: 2275 - protein, 16 aa, synthetic construct
TDNGSGSPHSKAHNQQ

SEQ ID NO: 2276 - protein, 16 aa, synthetic construct
TFHGSGSPHSKTQNQQ

SEQ ID NO: 2277 - protein, 16 aa, synthetic construct
TINGGGSPHSKAQTQQ

SEQ ID NO: 2278 - protein, 16 aa, synthetic construct
TSNGSGSPHSKAQNPP

SEQ ID NO: 2279 - protein, 16 aa, synthetic construct
TINGSGSPHSKAQNLQ

SEQ ID NO: 2280 - protein, 16 aa, synthetic construct
TVHGNGSPHSKAQNQQ

SEQ ID NO: 2281 - protein, 16 aa, synthetic construct
TINGGGSPHSKAQNQQ

SEQ ID NO: 2282 - protein, 16 aa, synthetic construct
TENMSGSPHSKAQNQQ

SEQ ID NO: 2283 - protein, 16 aa, synthetic construct
TENVSGSPHSKAQNQQ

SEQ ID NO: 2284 - protein, 16 aa, synthetic construct
TSSGSGSPHSKAQYQQ

SEQ ID NO: 2285 - protein, 16 aa, synthetic construct
TIDGGGSPHSKAQNKQ

SEQ ID NO: 2286 - protein, 16 aa, synthetic construct
TEKVSGSPHSKAQNQQ

SEQ ID NO: 2287 - protein, 16 aa, synthetic construct
AINGSGSPHSKAQDQE

SEQ ID NO: 2288 - protein, 16 aa, synthetic construct
TCNKSGSPHSKAQNQQ

SEQ ID NO: 2289 - protein, 16 aa, synthetic construct
TINGGGSPHSKAQNQL

SEQ ID NO: 2290 - protein, 16 aa, synthetic construct
NINGGGSPHSKAQNQQ

SEQ ID NO: 2291 - protein, 16 aa, synthetic construct
TEHLSGSPHSKAQNQQ

SEQ ID NO: 2292 - protein, 16 aa, synthetic construct
AEMGSGSPHSKAQNQQ

SEQ ID NO: 2293 - protein, 16 aa, synthetic construct
ATNGSGSPHSKAQNHQ

SEQ ID NO: 2294 - protein, 16 aa, synthetic construct
AIKGSGSPHSKAQDQQ

SEQ ID NO: 2295 - protein, 16 aa, synthetic construct
TINGGGSPHSKSQNQL

SEQ ID NO: 2296 - protein, 16 aa, synthetic construct
TVNGNGSPHSKAQNKQ

SEQ ID NO: 2297 - protein, 16 aa, synthetic construct
TINGSGSPHSKGHWQQ

SEQ ID NO: 2298 - protein, 16 aa, synthetic construct
TDKTSGSPHSKAQNQQ

SEQ ID NO: 2299 - protein, 16 aa, synthetic construct
TFKGSGSPHSKAPNQQ

SEQ ID NO: 2300 - protein, 16 aa, synthetic construct
TVNGSGSPHSKAQNQL

SEQ ID NO: 2301 - protein, 16 aa, synthetic construct
TINGSGSPHSKRPEQQ

SEQ ID NO: 2302 - protein, 16 aa, synthetic construct
TINGSGSPHSKAQRTM

SEQ ID NO: 2303 - protein, 16 aa, synthetic construct
TEKASGSPHSKAQNQQ

SEQ ID NO: 2304 - protein, 16 aa, synthetic construct
SDQGSGSPHSKAQNQQ

SEQ ID NO: 2305 - protein, 16 aa, synthetic construct
TEITSGSPHSKAQNQQ

SEQ ID NO: 2306 - protein, 16 aa, synthetic construct
TDKSSGSPHSKAQNQQ

SEQ ID NO: 2307 - protein, 16 aa, synthetic construct
TIDGSGSPHSKAQNQQ

SEQ ID NO: 2308 - protein, 16 aa, synthetic construct
TVNGNGSPHSKAQNQH

SEQ ID NO: 2309 - protein, 16 aa, synthetic construct
NTNGSGSPHSKAQNQQ

SEQ ID NO: 2310 - protein, 16 aa, synthetic construct
TETHSGSPHSKAQNQQ

SEQ ID NO: 2311 - protein, 16 aa, synthetic construct
TINGGGSPHSKALNQQ

SEQ ID NO: 2312 - protein, 16 aa, synthetic construct
TINGSGSPHSKALHQH

SEQ ID NO: 2313 - protein, 16 aa, synthetic construct
TINGTGSPHSKAQNHQ

SEQ ID NO: 2314 - protein, 16 aa, synthetic construct
TINGSGSPHSKAQHRI

SEQ ID NO: 2315 - protein, 16 aa, synthetic construct
TINGSGSPHSKAQYIH

SEQ ID NO: 2316 - protein, 16 aa, synthetic construct
TENISGSPHSKAQNQQ

SEQ ID NO: 2317 - protein, 16 aa, synthetic construct
TIIGGGSPHSKAHNQQ

SEQ ID NO: 2318 - protein, 16 aa, synthetic construct
TINGSGSPHSKAQKFE

SEQ ID NO: 2319 - protein, 16 aa, synthetic construct
TSNESGSPHSKAQNHQ

SEQ ID NO: 2320 - protein, 16 aa, synthetic construct
TINGSGSPHSKAQFPS

SEQ ID NO: 2321 - protein, 16 aa, synthetic construct
TERPSGSPHSKAQNQQ

SEQ ID NO: 2322 - protein, 16 aa, synthetic construct
TINGNGSPHSKAQNPL

SEQ ID NO: 2323 - protein, 16 aa, synthetic construct
SIKGNGSPHSKAQNQQ

SEQ ID NO: 2324 - protein, 16 aa, synthetic construct
TERMSGSPHSKAQNQQ

SEQ ID NO: 2325 - protein, 16 aa, synthetic construct
TERSSGSPHSKAQNQQ

SEQ ID NO: 2326 - protein, 16 aa, synthetic construct
TELHSGSPHSKAQNQQ

SEQ ID NO: 2327 - protein, 16 aa, synthetic construct
TELTSGSPHSKAQNQQ

SEQ ID NO: 2328 - protein, 16 aa, synthetic construct
TINGSGSPHSKAHNQQ

SEQ ID NO: 2329 - protein, 16 aa, synthetic construct
TINGGGSPHSKAQSQQ

SEQ ID NO: 2330 - protein, 16 aa, synthetic construct
TINGSGSPHSKAQAIK

SEQ ID NO: 2331 - protein, 16 aa, synthetic construct
TENTSGSPHSKAQNQQ

SEQ ID NO: 2332 - protein, 16 aa, synthetic construct
TIDGSGSPHSKGQNRQ

SEQ ID NO: 2333 - protein, 16 aa, synthetic construct
NINGSGSPHSKAQSQQ

SEQ ID NO: 2334 - protein, 16 aa, synthetic construct
TINGSVSPHGKAQNQL

SEQ ID NO: 2335 - protein, 16 aa, synthetic construct
TSNASGSPHSKAQNQL

SEQ ID NO: 2336 - protein, 16 aa, synthetic construct
TEARSGSPHSKAQNQQ

SEQ ID NO: 2337 - protein, 16 aa, synthetic construct
TEKNSGSPHSKAQNQQ

SEQ ID NO: 2338 - protein, 16 aa, synthetic construct
TANGSGSPHSKAQYQQ

SEQ ID NO: 2339 - protein, 16 aa, synthetic construct
TVNGSGSPHSKAQYQH

SEQ ID NO: 2340 - protein, 16 aa, synthetic construct
TINGSGSPHTKAQNPQ

SEQ ID NO: 2341 - protein, 16 aa, synthetic construct
TINGSGSPHSKGQNPP

SEQ ID NO: 2342 - protein, 16 aa, synthetic construct
TIIGSGSPHSKAQHQL

SEQ ID NO: 2343 - protein, 16 aa, synthetic construct
TINGSGSPHSKAQSPP

SEQ ID NO: 2344 - protein, 16 aa, synthetic construct
TIYGSGSPHSKAQNQQ

SEQ ID NO: 2345 - protein, 16 aa, synthetic construct
TINGSGSPHSKAQAKL

SEQ ID NO: 2346 - protein, 16 aa, synthetic construct
TDKNSGSPHSKAQNQQ

SEQ ID NO: 2347 - protein, 16 aa, synthetic construct
TINGSGSPHSKTKSQQ

SEQ ID NO: 2348 - protein, 16 aa, synthetic construct
TINGSGSPHSKAQDRP

SEQ ID NO: 2349 - protein, 16 aa, synthetic construct
TINGIGSPHSKAQNLG

SEQ ID NO: 2350 - protein, 16 aa, synthetic construct
TINGSGSPHSKAQSQQ

SEQ ID NO: 2351 - protein, 16 aa, synthetic construct
TENLSGSPHSKAQNQQ

SEQ ID NO: 2352 - protein, 16 aa, synthetic construct
TINGSGSPHSKAQAFH

SEQ ID NO: 2353 - protein, 16 aa, synthetic construct
TINGSGSPHSKAQKQQ

SEQ ID NO: 2354 - protein, 16 aa, synthetic construct
TFSGSGSPHSKAQNLQ

SEQ ID NO: 2355 - protein, 16 aa, synthetic construct
AINGSGSPHSKAQNAQ

SEQ ID NO: 2356 - protein, 16 aa, synthetic construct
TESWSGSPHSKAQNQQ

SEQ ID NO: 2357 - protein, 16 aa, synthetic construct
TTNGSGSPHSKAHNQL

SEQ ID NO: 2358 - protein, 16 aa, synthetic construct
TVNGNGSPHSKAQNHQ

SEQ ID NO: 2359 - protein, 16 aa, synthetic construct
TEDKSGSPHSKAQNQQ

SEQ ID NO: 2360 - protein, 16 aa, synthetic construct
TESASGSPHSKAQNQQ

SEQ ID NO: 2361 - protein, 16 aa, synthetic construct
TNNGSGSPHSKAQNQQ

SEQ ID NO: 2362 - protein, 16 aa, synthetic construct
TSNGGGSPHSKAQNLQ

SEQ ID NO: 2363 - protein, 16 aa, synthetic construct
TDKMSGSPHSKAQNQQ

SEQ ID NO: 2364 - protein, 16 aa, synthetic construct
EVHGSGSPHSKAQNQQ

SEQ ID NO: 2365 - protein, 16 aa, synthetic construct
TINGSGSPHSKAQKLN

SEQ ID NO: 2366 - protein, 16 aa, synthetic construct
TINGGGSPHSKSQNQH

SEQ ID NO: 2367 - protein, 16 aa, synthetic construct
TVNGGGSPHSKAQSQQ

SEQ ID NO: 2368 - protein, 16 aa, synthetic construct
TTNGSGSPHSKAQYQH

SEQ ID NO: 2369 - protein, 16 aa, synthetic construct
TISGSGSPHSKAQYQH

SEQ ID NO: 2370 - protein, 16 aa, synthetic construct
TESTSGSPHSKAQNQQ

SEQ ID NO: 2371 - protein, 16 aa, synthetic construct
TINGSGSPHSKSQNVQ

SEQ ID NO: 2372 - protein, 16 aa, synthetic construct
SINGSGSPHSKAQAQQ

SEQ ID NO: 2373 - protein, 16 aa, synthetic construct
TVNGSGSPHSKAQNLQ

SEQ ID NO: 2374 - protein, 16 aa, synthetic construct
TVRDSGSPHSKAQNQQ

SEQ ID NO: 2375 - protein, 16 aa, synthetic construct
TFNASGSPHSKAPNQQ

SEQ ID NO: 2376 - protein, 16 aa, synthetic construct
TDRMSGSPHSKAQNQQ

SEQ ID NO: 2377 - protein, 16 aa, synthetic construct
TINGSGSPHSKAQTPP

SEQ ID NO: 2378 - protein, 16 aa, synthetic construct
TIKGSGSPHSKAQNQQ

SEQ ID NO: 2379 - protein, 16 aa, synthetic construct
NHIGSGSPHSKAQNQQ

SEQ ID NO: 2380 - protein, 16 aa, synthetic construct
TINGSGSPHSKAQYQH

SEQ ID NO: 2381 - protein, 16 aa, synthetic construct
TIPIDGSPHSKAQNQQ

SEQ ID NO: 2382 - protein, 16 aa, synthetic construct
TINGSGSPHSKAQGQQ

SEQ ID NO: 2383 - protein, 16 aa, synthetic construct
TFNGSGSPHNKAQNHQ

SEQ ID NO: 2384 - protein, 16 aa, synthetic construct
ESDGSGSPHSKAQNQQ

SEQ ID NO: 2385 - protein, 16 aa, synthetic construct
TINGSGSPHSKAQPPA

SEQ ID NO: 2386 - protein, 16 aa, synthetic construct
TINGSGSPHSKAQERP

SEQ ID NO: 2387 - protein, 16 aa, synthetic construct
TIKGSGSPHSKAQDLQ

SEQ ID NO: 2388 - protein, 16 aa, synthetic construct
TDLKSGSPHSKAQNQQ

SEQ ID NO: 2389 - protein, 16 aa, synthetic construct
TINGGGSPHSKAQNPP

SEQ ID NO: 2390 - protein, 16 aa, synthetic construct
TINGSGSPHSKAQAMH

SEQ ID NO: 2391 - protein, 16 aa, synthetic construct
TVPNSGSPHSKAQNQQ

SEQ ID NO: 2392 - protein, 16 aa, synthetic construct
TVIGSGSPHSKALNQQ

SEQ ID NO: 2393 - protein, 16 aa, synthetic construct
TINGSGSPHSKAQHPS

SEQ ID NO: 2394 - protein, 16 aa, synthetic construct
TINGLGSPHSKSQNQQ

SEQ ID NO: 2395 - protein, 16 aa, synthetic construct
TINGTGSPHSKAQNQQ

SEQ ID NO: 2396 - protein, 16 aa, synthetic construct
TINGSGSPHSKAPGLQ

SEQ ID NO: 2397 - protein, 16 aa, synthetic construct
TINGSGSPHSKAQGIR

SEQ ID NO: 2398 - protein, 16 aa, synthetic construct
TESHSGSPHSKAQNQQ

SEQ ID NO: 2399 - protein, 16 aa, synthetic construct
TINGSGSPHSKAQAPA

SEQ ID NO: 2400 - protein, 16 aa, synthetic construct
TINGSGSPHSKSQSQQ

SEQ ID NO: 2401 - protein, 16 aa, synthetic construct
AEHGSGSPHSKAQNQQ

SEQ ID NO: 2402 - protein, 16 aa, synthetic construct
TEDRSGSPHSKAQNQQ

SEQ ID NO: 2403 - protein, 16 aa, synthetic construct
NCLGSGSPHSKAQNQQ

SEQ ID NO: 2404 - protein, 16 aa, synthetic construct
TDRGSGSPHSKAQNQQ

SEQ ID NO: 2405 - protein, 16 aa, synthetic construct
TINGSGSPHSKAQIPP

SEQ ID NO: 2406 - protein, 16 aa, synthetic construct
TVKGSGSPHSKAQDQQ

SEQ ID NO: 2407 - protein, 16 aa, synthetic construct
NADGSGSPHSKAQNQQ

SEQ ID NO: 2408 - protein, 16 aa, synthetic construct
TDKVSGSPHSKAQNQQ

SEQ ID NO: 2409 - protein, 16 aa, synthetic construct
TITGSGSPHSKAQTQL

SEQ ID NO: 2410 - protein, 16 aa, synthetic construct
TINGSGSPHSKAQAPS

SEQ ID NO: 2411 - protein, 16 aa, synthetic construct
NCVGSGSPHSKAQNQQ

SEQ ID NO: 2412 - protein, 16 aa, synthetic construct
TIRDAGSPHSKAQNQQ

SEQ ID NO: 2413 - protein, 16 aa, synthetic construct
TVKDSGSPHSKAQNQQ

SEQ ID NO: 2414 - protein, 16 aa, synthetic construct
NALGSGSPHSKAQNQQ

SEQ ID NO: 2415 - protein, 16 aa, synthetic construct
VINGSGSPHSKGQNQQ

SEQ ID NO: 2416 - protein, 16 aa, synthetic construct
TVNGGGSPHSKAQNQQ

SEQ ID NO: 2417 - protein, 16 aa, synthetic construct
TIQDGGSPHSKAQNQQ

SEQ ID NO: 2418 - protein, 16 aa, synthetic construct
TISGGGSPHSKAQNQQ

SEQ ID NO: 2419 - protein, 16 aa, synthetic construct
TSNASGSPHSKAHNQQ

SEQ ID NO: 2420 - protein, 16 aa, synthetic construct
TINGSGSPHSKAQNTY

SEQ ID NO: 2421 - protein, 16 aa, synthetic construct
TINGSGSPHSKSQNQH

SEQ ID NO: 2422 - protein, 16 aa, synthetic construct
TINGGGSPHSKAQDKQ

SEQ ID NO: 2423 - protein, 16 aa, synthetic construct
TEFVSGSPHSKAQNQQ

SEQ ID NO: 2424 - protein, 16 aa, synthetic construct
TVNGSGSPHSKAQNHL

SEQ ID NO: 2425 - protein, 16 aa, synthetic construct
TREISGSPHSKAQNQQ

SEQ ID NO: 2426 - protein, 16 aa, synthetic construct
TINGSGSPHSKAQIGM

SEQ ID NO: 2427 - protein, 16 aa, synthetic construct
TIDGSGSPHSKALNKQ

SEQ ID NO: 2428 - protein, 16 aa, synthetic construct
TIIGGGSPHSKAQNPQ

SEQ ID NO: 2429 - protein, 16 aa, synthetic construct
QGEGSGSPHSKAQNQQ

SEQ ID NO: 2430 - protein, 16 aa, synthetic construct
TINGTGSPHSKAPNQL

SEQ ID NO: 2431 - protein, 16 aa, synthetic construct
TVNGSGSPHSKAQLQQ

SEQ ID NO: 2432 - protein, 16 aa, synthetic construct
TFNGGGSPHSKAQYQQ

SEQ ID NO: 2433 - protein, 16 aa, synthetic construct
SINGSGSPHSKTQSQQ

SEQ ID NO: 2434 - protein, 16 aa, synthetic construct
TVNGGGSPHSKAQHQQ

SEQ ID NO: 2435 - protein, 16 aa, synthetic construct
SEKGSGSPHSKAQNQQ

SEQ ID NO: 2436 - protein, 16 aa, synthetic construct
NVNGSGSPHSKAQNQQ

SEQ ID NO: 2437 - protein, 16 aa, synthetic construct
GGEGSGSPHSKAQNQQ

SEQ ID NO: 2438 - protein, 16 aa, synthetic construct
TINGSGSPHSKAQRMS

SEQ ID NO: 2439 - protein, 16 aa, synthetic construct
TINGSGSPHSKAQGIL

SEQ ID NO: 2440 - protein, 16 aa, synthetic construct
EFVGSGSPHSKAQNQQ

SEQ ID NO: 2441 - protein, 16 aa, synthetic construct
TIIGSGSPHSKAQDRQ

SEQ ID NO: 2442 - protein, 16 aa, synthetic construct
SDKGSGSPHSKAQNQQ

SEQ ID NO: 2443 - protein, 16 aa, synthetic construct
TEQVSGSPHSKAQNQQ

SEQ ID NO: 2444 - protein, 16 aa, synthetic construct
TEHVSGSPHSKAQNQQ

SEQ ID NO: 2445 - protein, 16 aa, synthetic construct
TINGSGSPHSKARDWQ

SEQ ID NO: 2446 - protein, 16 aa, synthetic construct
TENASGSPHSKAQNQQ

SEQ ID NO: 2447 - protein, 16 aa, synthetic construct
EVQGSGSPHSKAQNQQ

SEQ ID NO: 2448 - protein, 16 aa, synthetic construct
TINGSGSPHSKAQNTH

SEQ ID NO: 2449 - protein, 16 aa, synthetic construct
TINGSGSPHSKAPNLQ

SEQ ID NO: 2450 - protein, 16 aa, synthetic construct
TINGSGSPHSKAQERS

SEQ ID NO: 2451 - protein, 16 aa, synthetic construct
TSNGSGSPHSKAQNYQ

SEQ ID NO: 2452 - protein, 16 aa, synthetic construct
TEYISGSPHSKAQNQQ

SEQ ID NO: 2453 - protein, 16 aa, synthetic construct
TINGSGSPHSKAQRTC

SEQ ID NO: 2454 - protein, 16 aa, synthetic construct
TINGSGSPHSKAQIGH

SEQ ID NO: 2455 - protein, 16 aa, synthetic construct
NCWGSGSPHSKAQNQQ

SEQ ID NO: 2456 - protein, 16 aa, synthetic construct
TINGSGSPHSKAQGAI

SEQ ID NO: 2457 - protein, 16 aa, synthetic construct
TDVNSGSPHSKAQNQQ

SEQ ID NO: 2458 - protein, 16 aa, synthetic construct
SDIGSGSPHSKAQNQQ

SEQ ID NO: 2459 - protein, 16 aa, synthetic construct
TINGSGSPHSKAQVPP

SEQ ID NO: 2460 - protein, 16 aa, synthetic construct
TINGSGSPHSKAQVQQ

SEQ ID NO: 2461 - protein, 16 aa, synthetic construct
TINGSGSPHSKALMRQ

SEQ ID NO: 2462 - protein, 16 aa, synthetic construct
TINGSGSPHSKAQYSV

SEQ ID NO: 2463 - protein, 16 aa, synthetic construct
NSIGSGSPHSKAQNQQ

SEQ ID NO: 2464 - protein, 16 aa, synthetic construct
TINGSGSPHSKVPNLQ

SEQ ID NO: 2465 - protein, 16 aa, synthetic construct
AINGSGSPHSKAQSQQ

SEQ ID NO: 2466 - protein, 16 aa, synthetic construct
TINGSGSPHSKAQAIT

SEQ ID NO: 2467 - protein, 16 aa, synthetic construct
TINGSGSPHSKAQKTL

SEQ ID NO: 2468 - protein, 16 aa, synthetic construct
TVNGSGSPHSKAQNQW

SEQ ID NO: 2469 - protein, 16 aa, synthetic construct
TINGSGSPHSKAQLHH

SEQ ID NO: 2470 - protein, 16 aa, synthetic construct
TEQTSGSPHSKAQNQQ

SEQ ID NO: 2471 - protein, 16 aa, synthetic construct
TINGSGSPHSKAQNII

SEQ ID NO: 2472 - protein, 16 aa, synthetic construct
NSLGSGSPHSKAQNQQ

SEQ ID NO: 2473 - protein, 16 aa, synthetic construct
TIPMEGSPHSKAQNQQ

SEQ ID NO: 2474 - protein, 16 aa, synthetic construct
TINGSGSPHSKAQGHH

SEQ ID NO: 2475 - protein, 16 aa, synthetic construct
TDRTSGSPHSKAQNQQ

SEQ ID NO: 2476 - protein, 16 aa, synthetic construct
TINGSGSPHSKAQSKV

SEQ ID NO: 2477 - protein, 16 aa, synthetic construct
EVVGSGSPHSKAQNQQ

SEQ ID NO: 2478 - protein, 16 aa, synthetic construct
TINGSGSPHSKAQLPS

SEQ ID NO: 2479 - protein, 16 aa, synthetic construct
TINGSGSPHSKAIGKQ

SEQ ID NO: 2480 - protein, 16 aa, synthetic construct
TEPTSGSPHSKAQNQQ

SEQ ID NO: 2481 - protein, 16 aa, synthetic construct
TVNGGGSPHSKSQNQQ

SEQ ID NO: 2482 - protein, 16 aa, synthetic construct
TINGSGSPHSKAQAIH

SEQ ID NO: 2483 - protein, 16 aa, synthetic construct
TINGSGSPHSKAQHGL

SEQ ID NO: 2484 - protein, 16 aa, synthetic construct
SELGSGSPHSKAQNQQ

SEQ ID NO: 2485 - protein, 16 aa, synthetic construct
TINGSGSPHSKAQFMC

SEQ ID NO: 2486 - protein, 16 aa, synthetic construct
TINVSGSPHSKAQGQQ

SEQ ID NO: 2487 - protein, 16 aa, synthetic construct
TINGGGSPHSKAQNQM

SEQ ID NO: 2488 - protein, 16 aa, synthetic construct
TVNGSGSPHSKAQHLQ

SEQ ID NO: 2489 - protein, 16 aa, synthetic construct
TIRENGSPHSKAQNQQ

SEQ ID NO: 2490 - protein, 16 aa, synthetic construct
TINGSGSPHSKTQNHQ

SEQ ID NO: 2491 - protein, 16 aa, synthetic construct
TINGSGSPHSKAQPAR

SEQ ID NO: 2492 - protein, 16 aa, synthetic construct
TVNGSGSPHSKAQSLQ

SEQ ID NO: 2493 - protein, 16 aa, synthetic construct
TINGSGSPHSKSQSQL

SEQ ID NO: 2494 - protein, 16 aa, synthetic construct
TINGSASPHSKAHSQQ

SEQ ID NO: 2495 - protein, 16 aa, synthetic construct
TWQNSGSPHSKAQNQQ

SEQ ID NO: 2496 - protein, 16 aa, synthetic construct
TINGSGSPHSKAQDRQ

SEQ ID NO: 2497 - protein, 16 aa, synthetic construct
TINGSGSPHSKAQMPS

SEQ ID NO: 2498 - protein, 16 aa, synthetic construct
TNNGGGSPHSKAQNLQ

SEQ ID NO: 2499 - protein, 16 aa, synthetic construct
TINGSGSPHSKAQGSL

SEQ ID NO: 2500 - protein, 16 aa, synthetic construct
TEVTSGSPHSKAQNQQ

SEQ ID NO: 2501 - protein, 16 aa, synthetic construct
SINGGGSPHSKAQYQQ

SEQ ID NO: 2502 - protein, 16 aa, synthetic construct
TVIGSGSPHSKSQNQQ

SEQ ID NO: 2503 - protein, 16 aa, synthetic construct
AVNVSGSPHSKAQNQQ

SEQ ID NO: 2504 - protein, 16 aa, synthetic construct
TVNGNGSPHSKSQNQQ

SEQ ID NO: 2505 - protein, 16 aa, synthetic construct
TDRNSGSPHSKAQNQQ

SEQ ID NO: 2506 - protein, 16 aa, synthetic construct
TINGSGSPHSKAQVPA

SEQ ID NO: 2507 - protein, 16 aa, synthetic construct
GVLGSGSPHSKAQNQQ

SEQ ID NO: 2508 - protein, 16 aa, synthetic construct
TLNGNGSPHSKAQNLQ

SEQ ID NO: 2509 - protein, 16 aa, synthetic construct
AINGSGSPHSKAQDKQ

SEQ ID NO: 2510 - protein, 16 aa, synthetic construct
TSNGSGSPHSKAHYQQ

SEQ ID NO: 2511 - protein, 16 aa, synthetic construct
TINGSGSPHSKAQVPS

SEQ ID NO: 2512 - protein, 16 aa, synthetic construct
TELRSGSPHSKAQNQQ

SEQ ID NO: 2513 - protein, 16 aa, synthetic construct
NINGSGSPHSKAQNHQ

SEQ ID NO: 2514 - protein, 16 aa, synthetic construct
TVNGGGSPHSKAQNHQ

SEQ ID NO: 2515 - protein, 16 aa, synthetic construct
TINGSGSPHSKARGEQ

SEQ ID NO: 2516 - protein, 16 aa, synthetic construct
TINGGGSPHSKAQYQH

SEQ ID NO: 2517 - protein, 16 aa, synthetic construct
TEDLSGSPHSKAQNQQ

SEQ ID NO: 2518 - protein, 16 aa, synthetic construct
TINGSGSPHSKAPGQQ

SEQ ID NO: 2519 - protein, 16 aa, synthetic construct
TIPKNGSPHSKAQNQQ

SEQ ID NO: 2520 - protein, 16 aa, synthetic construct
TINGSGSPHSKAQSLQ

SEQ ID NO: 2521 - protein, 16 aa, synthetic construct
TINGSGSPHSKRLEQQ

SEQ ID NO: 2522 - protein, 16 aa, synthetic construct
TERGSGSPHSKAQNQQ

SEQ ID NO: 2523 - protein, 16 aa, synthetic construct
TVNGSGSPHSKAPNQQ

SEQ ID NO: 2524 - protein, 16 aa, synthetic construct
TSNGSGSPHSKAQNQS

SEQ ID NO: 2525 - protein, 16 aa, synthetic construct
TINGSGSPHSKAQKVI

SEQ ID NO: 2526 - protein, 16 aa, synthetic construct
TEGISGSPHSKAQNQQ

SEQ ID NO: 2527 - protein, 16 aa, synthetic construct
TINGSGSPHSKAQNND

SEQ ID NO: 2528 - protein, 16 aa, synthetic construct
TINGSGSPHSKAQSVH

SEQ ID NO: 2529 - protein, 16 aa, synthetic construct
TINGSGSPHSKAQPLG

SEQ ID NO: 2530 - protein, 16 aa, synthetic construct
TINKEGSPHSKAQNQQ

SEQ ID NO: 2531 - protein, 16 aa, synthetic construct
TCNASGSPHSKAQNQQ

SEQ ID NO: 2532 - protein, 16 aa, synthetic construct
AINGSGSPHSKAHNQE

SEQ ID NO: 2533 - protein, 16 aa, synthetic construct
TEGLSGSPHSKAQNQQ

SEQ ID NO: 2534 - protein, 16 aa, synthetic construct
TRDASGSPHSKAQNQQ

SEQ ID NO: 2535 - protein, 16 aa, synthetic construct
TSNGSGSPHSKAQNLQ

SEQ ID NO: 2536 - protein, 16 aa, synthetic construct
TGNGSGSPHSKAQIQQ

SEQ ID NO: 2537 - protein, 16 aa, synthetic construct
TVNGGGSPHSKAQNLQ

SEQ ID NO: 2538 - protein, 16 aa, synthetic construct
TDRSSGSPHSKAQNQQ

SEQ ID NO: 2539 - protein, 16 aa, synthetic construct
TINGSGSPHSKAQVRN

SEQ ID NO: 2540 - protein, 16 aa, synthetic construct
TINGSGSPHSKAPSNQ

SEQ ID NO: 2541 - protein, 16 aa, synthetic construct
TINGSGSPHSKAQVGH

SEQ ID NO: 2542 - protein, 16 aa, synthetic construct
NAIGSGSPHSKAQNQQ

SEQ ID NO: 2543 - protein, 16 aa, synthetic construct
AENGSGSPHSKAQNQQ

SEQ ID NO: 2544 - protein, 16 aa, synthetic construct
TINGSGSPHSKAQRDI

SEQ ID NO: 2545 - protein, 16 aa, synthetic construct
TINGSGSPHSKAQMPN

SEQ ID NO: 2546 - protein, 16 aa, synthetic construct
TVNGSGSPHSKSQNQQ

SEQ ID NO: 2547 - protein, 16 aa, synthetic construct
TIPAIGSPHSKAQNQQ

SEQ ID NO: 2548 - protein, 16 aa, synthetic construct
TINGSGSPHSKARGLQ

SEQ ID NO: 2549 - protein, 16 aa, synthetic construct
TELGSGSPHSKAQNQQ

SEQ ID NO: 2550 - protein, 16 aa, synthetic construct
AETGSGSPHSKAQNQQ

SEQ ID NO: 2551 - protein, 16 aa, synthetic construct
TINGSGSPHSKLQKQQ

SEQ ID NO: 2552 - protein, 16 aa, synthetic construct
TINGSGSPHSKAPSLQ

SEQ ID NO: 2553 - protein, 16 aa, synthetic construct
TINGSGSPHSKAQRDQ

SEQ ID NO: 2554 - protein, 16 aa, synthetic construct
TDVGSGSPHSKAQNQQ

SEQ ID NO: 2555 - protein, 16 aa, synthetic construct
TINGSGSPHSKNRDQQ

SEQ ID NO: 2556 - protein, 16 aa, synthetic construct
SINGSGSPHSKAPNLQ

SEQ ID NO: 2557 - protein, 16 aa, synthetic construct
TINGSGSPHSKAQAKG

SEQ ID NO: 2558 - protein, 16 aa, synthetic construct
TVNGSGSPHSKAQDKQ

SEQ ID NO: 2559 - protein, 16 aa, synthetic construct
TINGGGSPHSKAQNPQ

SEQ ID NO: 2560 - protein, 16 aa, synthetic construct
TINGSGSPHSKAQSAH

SEQ ID NO: 2561 - protein, 16 aa, synthetic construct
TINGNGSPHSKSQNQH

SEQ ID NO: 2562 - protein, 16 aa, synthetic construct
TVPTSGSPHSKAQNQQ

SEQ ID NO: 2563 - protein, 16 aa, synthetic construct
TIDGSGSPHSKSQNHQ

SEQ ID NO: 2564 - protein, 16 aa, synthetic construct
TDVKSGSPHSKAQNQQ

SEQ ID NO: 2565 - protein, 16 aa, synthetic construct
AINRSGSPHSKAQDQQ

SEQ ID NO: 2566 - protein, 16 aa, synthetic construct
TINGSGSPHSKAQSTM

SEQ ID NO: 2567 - protein, 16 aa, synthetic construct
TVNASGSPHSKAQNQL

SEQ ID NO: 2568 - protein, 16 aa, synthetic construct
TINGSGSPHSKAQREM

SEQ ID NO: 2569 - protein, 16 aa, synthetic construct
TVHGSGSPHSKAQSQQ

SEQ ID NO: 2570 - protein, 16 aa, synthetic construct
TINGGGSPHSKSQNRQ

SEQ ID NO: 2571 - protein, 16 aa, synthetic construct
TINGSGSPHSKAQYRA

SEQ ID NO: 2572 - protein, 16 aa, synthetic construct
TINGGGSPHSKAQRQQ

SEQ ID NO: 2573 - protein, 16 aa, synthetic construct
TEPMSGSPHSKAQNQQ

SEQ ID NO: 2574 - protein, 16 aa, synthetic construct
TINGSGSPHSKNQWQQ

SEQ ID NO: 2575 - protein, 16 aa, synthetic construct
ETAGSGSPHSKAQNQQ

SEQ ID NO: 2576 - protein, 16 aa, synthetic construct
TINGSGSPHSKAQRMN

SEQ ID NO: 2577 - protein, 16 aa, synthetic construct
NNLGSGSPHSKAQNQQ

SEQ ID NO: 2578 - protein, 16 aa, synthetic construct
TINGSGSPHAKAQNHQ

SEQ ID NO: 2579 - protein, 16 aa, synthetic construct
TIIKNGSPHSKAQNQQ

SEQ ID NO: 2580 - protein, 16 aa, synthetic construct
TINGSGSPHSKAGDSQ

SEQ ID NO: 2581 - protein, 16 aa, synthetic construct
TINGSGSPHSKLKSQQ

SEQ ID NO: 2582 - protein, 16 aa, synthetic construct
TINGSGSPHSKAQKIS

SEQ ID NO: 2583 - protein, 16 aa, synthetic construct
TEYNSGSPHSKAQNQQ

SEQ ID NO: 2584 - protein, 16 aa, synthetic construct
TINGSGSPHSKAPSMQ

SEQ ID NO: 2585 - protein, 16 aa, synthetic construct
AINGSGSPHSKAQNQQ

SEQ ID NO: 2586 - protein, 16 aa, synthetic construct
TINGSGSPHSKASPRQ

SEQ ID NO: 2587 - protein, 16 aa, synthetic construct
TINGSGSPHSKRMEQQ

SEQ ID NO: 2588 - protein, 16 aa, synthetic construct
TINGSGSPHSKAQYQN

SEQ ID NO: 2589 - protein, 16 aa, synthetic construct
TINGSGSPHSKAQYYV

SEQ ID NO: 2590 - protein, 16 aa, synthetic construct
TINGSGSPHSKLRRQQ

SEQ ID NO: 2591 - protein, 16 aa, synthetic construct
TINGSGSPHSKAGCGQ

SEQ ID NO: 2592 - protein, 16 aa, synthetic construct
SMNGSGSPHSRAQNQQ

SEQ ID NO: 2593 - protein, 16 aa, synthetic construct
TINGSGSPHSKRLRQQ

SEQ ID NO: 2594 - protein, 16 aa, synthetic construct
TINGSGSPHSLRRNQQ

SEQ ID NO: 2595 - protein, 16 aa, synthetic construct
TINGSGSPHSRGRNQQ

SEQ ID NO: 2596 - protein, 16 aa, synthetic construct
TINGSGSPHSSRRNQQ

SEQ ID NO: 2597 - protein, 16 aa, synthetic construct
TINGSGSPHSKAFRLQ

SEQ ID NO: 2598 - protein, 16 aa, synthetic construct
TINGSCSPHRKAQNQQ

SEQ ID NO: 2599 - protein, 16 aa, synthetic construct
TINGSGSPHFLRQNQQ

SEQ ID NO: 2600 - protein, 16 aa, synthetic construct
TINGSGSPHSLRFNQQ

SEQ ID NO: 2601 - protein, 16 aa, synthetic construct
TINGSGSPHSKWLLQQ

SEQ ID NO: 2602 - protein, 16 aa, synthetic construct
TINGSGSPHSKRRLQQ

SEQ ID NO: 2603 - protein, 16 aa, synthetic construct
TINGSGSPHSKAQRKL

SEQ ID NO: 2604 - protein, 16 aa, synthetic construct
TINGSGSPHSKALRRQ

SEQ ID NO: 2605 - protein, 16 aa, synthetic construct
TINGSGSPHSKAQRLR

SEQ ID NO: 2606 - protein, 16 aa, synthetic construct
YLSGSGSPHSKAQNQQ

SEQ ID NO: 2607 - protein, 16 aa, synthetic construct
TINGSGSPHSKAQRRL

SEQ ID NO: 2608 - protein, 16 aa, synthetic construct
TINGSGSPHSKARRQQ

SEQ ID NO: 2609 - protein, 16 aa, synthetic construct
TINGSGSPHSKARRLQ

SEQ ID NO: 2610 - protein, 16 aa, synthetic construct
TINGSGSPHSKSRRQQ

SEQ ID NO: 2611 - protein, 16 aa, synthetic construct
TINGLLSPHWKAQNQQ

SEQ ID NO: 2612 - protein, 16 aa, synthetic construct
TINGSGSPHSKARLRQ

SEQ ID NO: 2613 - protein, 16 aa, synthetic construct
TINGSGSPHSKASKRQ

SEQ ID NO: 2614 - protein, 16 aa, synthetic construct
TINGSGSPHVRRQNQQ

SEQ ID NO: 2615 - protein, 16 aa, synthetic construct
TINGSGSPHSKAQLYR

SEQ ID NO: 2616 - protein, 16 aa, synthetic construct
GLSGSGSPHSKAQNQQ

SEQ ID NO: 2617 - protein, 16 aa, synthetic construct
TINGSGSPHSKAQLTV

SEQ ID NO: 2618 - protein, 16 aa, synthetic construct
TINGHDSPHKRGQHRQ

SEQ ID NO: 2619 - protein, 16 aa, synthetic construct
MPEGHDSPHKSGQNQQ

SEQ ID NO: 2620 - protein, 16 aa, synthetic construct
MEGGHDSPHKSGQNQQ

SEQ ID NO: 2621 - protein, 16 aa, synthetic construct
MEYGHDSPHKSGQNQQ

SEQ ID NO: 2622 - protein, 16 aa, synthetic construct
AEWGHDSPHKSGQNQQ

SEQ ID NO: 2623 - protein, 16 aa, synthetic construct
CEWGHDSPHKSGQNQQ

SEQ ID NO: 2624 - protein, 16 aa, synthetic construct
ANNGQDSPHKSGQNQQ

SEQ ID NO: 2625 - protein, 16 aa, synthetic construct
IPEGHDSPHKSGQNQQ

SEQ ID NO: 2626 - protein, 16 aa, synthetic construct
ADMGHDSPHKSGQNQQ

SEQ ID NO: 2627 - protein, 16 aa, synthetic construct
IEYGHDSPHKSGQNQQ

SEQ ID NO: 2628 - protein, 16 aa, synthetic construct
ADYGHDSPHKSGQNQQ

SEQ ID NO: 2629 - protein, 16 aa, synthetic construct
IETGHDSPHKSGQNQQ

SEQ ID NO: 2630 - protein, 16 aa, synthetic construct
MEWGHDSPHKSGQNQQ

SEQ ID NO: 2631 - protein, 16 aa, synthetic construct
CEYGHDSPHKSGQNQQ

SEQ ID NO: 2632 - protein, 16 aa, synthetic construct
RINGHDSPHKSGQKQQ

SEQ ID NO: 2633 - protein, 16 aa, synthetic construct
MEIGHDSPHKSGQNQQ

SEQ ID NO: 2634 - protein, 16 aa, synthetic construct
LEYGHDSPHKSGQNQQ

SEQ ID NO: 2635 - protein, 16 aa, synthetic construct
ADWGHDSPHKSGQNQQ

SEQ ID NO: 2636 - protein, 16 aa, synthetic construct
IEIGHDSPHKSGQNQQ

SEQ ID NO: 2637 - protein, 16 aa, synthetic construct
DIMGHDSPHKSGQNQQ

SEQ ID NO: 2638 - protein, 16 aa, synthetic construct
FEQGHDSPHKSGQNQQ

SEQ ID NO: 2639 - protein, 16 aa, synthetic construct
MEFGHDSPHKSGQNQQ

SEQ ID NO: 2640 - protein, 16 aa, synthetic construct
CDQGHDSPHKSGQNQQ

SEQ ID NO: 2641 - protein, 16 aa, synthetic construct
LPEGHDSPHKSGQNQQ

SEQ ID NO: 2642 - protein, 16 aa, synthetic construct
IENGHDSPHKSGQNQQ

SEQ ID NO: 2643 - protein, 16 aa, synthetic construct
MESGHDSPHKSGQNQQ

SEQ ID NO: 2644 - protein, 16 aa, synthetic construct
AEIGHDSPHKSGQNQQ

SEQ ID NO: 2645 - protein, 16 aa, synthetic construct
VEYGHDSPHKSGQNQQ

SEQ ID NO: 2646 - protein, 16 aa, synthetic construct
IINGHDSPHKSGLTQQ

SEQ ID NO: 2647 - protein, 16 aa, synthetic construct
TSNGDDSPHKSGRNQQ

SEQ ID NO: 2648 - protein, 16 aa, synthetic construct
IEVGHDSPHKSGQNQQ

SEQ ID NO: 2649 - protein, 16 aa, synthetic construct
MEMGHDSPHKSGQNQQ

SEQ ID NO: 2650 - protein, 16 aa, synthetic construct
AEVGHDSPHKSGQNQQ

SEQ ID NO: 2651 - protein, 16 aa, synthetic construct
MDAGHDSPHKSGQNQQ

SEQ ID NO: 2652 - protein, 16 aa, synthetic construct
VEWGHDSPHKSGQNQQ

SEQ ID NO: 2653 - protein, 16 aa, synthetic construct
AEQGHDSPHKSGQNQQ

SEQ ID NO: 2654 - protein, 16 aa, synthetic construct
LEWGHDSPHKSGQNQQ

SEQ ID NO: 2655 - protein, 16 aa, synthetic construct
MELGHDSPHKSGQNQQ

SEQ ID NO: 2656 - protein, 16 aa, synthetic construct
METGHDSPHKSGQNQQ

SEQ ID NO: 2657 - protein, 16 aa, synthetic construct
MEAGHDSPHKSGQNQQ

SEQ ID NO: 2658 - protein, 16 aa, synthetic construct
IESGHDSPHKSGQNQQ

SEQ ID NO: 2659 - protein, 16 aa, synthetic construct
MEVGHDSPHKSGQNQQ

SEQ ID NO: 2660 - protein, 16 aa, synthetic construct
CEIGHDSPHKSGQNQQ

SEQ ID NO: 2661 - protein, 16 aa, synthetic construct
ATNGHDSPHKSGLNQQ

SEQ ID NO: 2662 - protein, 16 aa, synthetic construct
MDGGHDSPHKSGQNQQ

SEQ ID NO: 2663 - protein, 16 aa, synthetic construct
QEVGHDSPHKSGQNQQ

SEQ ID NO: 2664 - protein, 16 aa, synthetic construct
ADQGHDSPHKSGQNQQ

SEQ ID NO: 2665 - protein, 16 aa, synthetic construct
TINGHESPHKSAQNHQ

SEQ ID NO: 2666 - protein, 16 aa, synthetic construct
TINGHDSPHKSAQNQW

SEQ ID NO: 2667 - protein, 16 aa, synthetic construct
NMNGHDSPHKSGQNTH

SEQ ID NO: 2668 - protein, 16 aa, synthetic construct
IEMGHDSPHKSGQNQQ

SEQ ID NO: 2669 - protein, 16 aa, synthetic construct
TINGHDSPHKSGRRRQ

SEQ ID NO: 2670 - protein, 16 aa, synthetic construct
ISNGHDSPHKSAQNQQ

SEQ ID NO: 2671 - protein, 16 aa, synthetic construct
TGNGHDSPHKSGQYQQ

SEQ ID NO: 2672 - protein, 16 aa, synthetic construct
TINGNYSPHKIGQNQQ

SEQ ID NO: 2673 - protein, 16 aa, synthetic construct
TINGHDSPHKSRQNDQ

SEQ ID NO: 2674 - protein, 16 aa, synthetic construct
QQQGHDSPHKSGQNQQ

SEQ ID NO: 2675 - protein, 16 aa, synthetic construct
HDWGHDSPHKSGQNQQ

SEQ ID NO: 2676 - protein, 16 aa, synthetic construct
IEGGHDSPHKSGQNQQ

SEQ ID NO: 2677 - protein, 16 aa, synthetic construct
TFNRSGSPHSKAQNQQ

SEQ ID NO: 2678 - protein, 16 aa, synthetic construct
AINGHDSPHKSGQIRQ

SEQ ID NO: 2679 - protein, 16 aa, synthetic construct
TINGHDSPHKIGQNQH

SEQ ID NO: 2680 - protein, 16 aa, synthetic construct
AINGYDSPHKSGQKQQ

SEQ ID NO: 2681 - protein, 16 aa, synthetic construct
TESGHDSPHKSGQNQQ

SEQ ID NO: 2682 - protein, 16 aa, synthetic construct
TINGHDSPHKSGQSVQ

SEQ ID NO: 2683 - protein, 16 aa, synthetic construct
TINGHESPHKSGRSQQ

SEQ ID NO: 2684 - protein, 16 aa, synthetic construct
TINGHDSPHKSGQNKL

SEQ ID NO: 2685 - protein, 16 aa, synthetic construct
TINGHDSPHKTGQNQQ

SEQ ID NO: 2686 - protein, 16 aa, synthetic construct
TINGRGSPHKRGQNQQ

SEQ ID NO: 2687 - protein, 16 aa, synthetic construct
TINGSGSPHTKAQNPP

SEQ ID NO: 2688 - protein, 16 aa, synthetic construct
TINGQDSPHKSGQHQQ

SEQ ID NO: 2689 - protein, 16 aa, synthetic construct
SINGHDSPHKSGQIQH

SEQ ID NO: 2690 - protein, 16 aa, synthetic construct
AINGHDSPHKSGPRQQ

SEQ ID NO: 2691 - protein, 16 aa, synthetic construct
TVNGHDSPHKSGHTQQ

SEQ ID NO: 2692 - protein, 16 aa, synthetic construct
SINGHDSPHKSGQRQH

SEQ ID NO: 2693 - protein, 16 aa, synthetic construct
SLNGSGSPHTKAQNQQ

SEQ ID NO: 2694 - protein, 16 aa, synthetic construct
AINGHDSPHKSAQSQQ

SEQ ID NO: 2695 - protein, 16 aa, synthetic construct
SIYGHESPHKSGQNQQ

SEQ ID NO: 2696 - protein, 16 aa, synthetic construct
TVNGHDSPHKSLQNQQ

SEQ ID NO: 2697 - protein, 16 aa, synthetic construct
TINGHGSPHSKAQNPQ

SEQ ID NO: 2698 - protein, 16 aa, synthetic construct
TSNGYDSPHKSGQKQQ

SEQ ID NO: 2699 - protein, 16 aa, synthetic construct
TVNGHDSPHKSGRNQE

SEQ ID NO: 2700 - protein, 16 aa, synthetic construct
TTNGHDSPHKSGQTQL

SEQ ID NO: 2701 - protein, 16 aa, synthetic construct
AINGHDSPHKSEKNQQ

SEQ ID NO: 2702 - protein, 16 aa, synthetic construct
IINGRDSPHKSGQDQQ

SEQ ID NO: 2703 - protein, 16 aa, synthetic construct
TISGHDSPHKTGHNQQ

SEQ ID NO: 2704 - protein, 16 aa, synthetic construct
SINGYDSPHKSGQTQQ

SEQ ID NO: 2705 - protein, 16 aa, synthetic construct
TINGHESPHKSGQTQQ

SEQ ID NO: 2706 - protein, 16 aa, synthetic construct
TINGHDSPHKSGQSKQ

SEQ ID NO: 2707 - protein, 16 aa, synthetic construct
AIIGHESPHKSGQNQQ

SEQ ID NO: 2708 - protein, 16 aa, synthetic construct
TINGHDSPHKTGQNQP

SEQ ID NO: 2709 - protein, 16 aa, synthetic construct
AINGHDSPHKSGQSPQ

SEQ ID NO: 2710 - protein, 16 aa, synthetic construct
TIKGNDSPHKSVQNQQ

SEQ ID NO: 2711 - protein, 16 aa, synthetic construct
TEFGHDSPHKSGQNQQ

SEQ ID NO: 2712 - protein, 16 aa, synthetic construct
TINGHDSPHKSAQNYQ

SEQ ID NO: 2713 - protein, 16 aa, synthetic construct
TFNGSASPHSKALNQQ

SEQ ID NO: 2714 - protein, 16 aa, synthetic construct
TINGHESPHKSAQNRQ

SEQ ID NO: 2715 - protein, 16 aa, synthetic construct
TTNGHDSPHKSGQNQQ

SEQ ID NO: 2716 - protein, 16 aa, synthetic construct
TIKGQDSPHKIGQNQQ

SEQ ID NO: 2717 - protein, 16 aa, synthetic construct
TVNGHDSPHKSGQNHL

SEQ ID NO: 2718 - protein, 16 aa, synthetic construct
SINGHDSPHKSGQYQH

SEQ ID NO: 2719 - protein, 16 aa, synthetic construct
TINGNDSPHKSVQNHQ

SEQ ID NO: 2720 - protein, 16 aa, synthetic construct
TITGHDSPHKSGQNQW

SEQ ID NO: 2721 - protein, 16 aa, synthetic construct
TNNGHDSPHKSVQNQH

SEQ ID NO: 2722 - protein, 16 aa, synthetic construct
TIDGHDSPHKSGQNQH

SEQ ID NO: 2723 - protein, 16 aa, synthetic construct
TVNGHDSPHKSGQTRQ

SEQ ID NO: 2724 - protein, 16 aa, synthetic construct
TVNGHDSPHKSGQNLH

SEQ ID NO: 2725 - protein, 16 aa, synthetic construct
AISGHDSPHKSGLNQQ

SEQ ID NO: 2726 - protein, 16 aa, synthetic construct
AINGHDSPHKSAQNQE

SEQ ID NO: 2727 - protein, 16 aa, synthetic construct
TITGHDSPHKSGQHLQ

SEQ ID NO: 2728 - protein, 16 aa, synthetic construct
TINGHDSPHKSRLNQP

SEQ ID NO: 2729 - protein, 16 aa, synthetic construct
TVDGHDSPHKSGQKQQ

SEQ ID NO: 2730 - protein, 16 aa, synthetic construct
TINGQDSPHKSGQNQD

SEQ ID NO: 2731 - protein, 16 aa, synthetic construct
TIEGHDSPHKSGRNQQ

SEQ ID NO: 2732 - protein, 16 aa, synthetic construct
TTNGHDSPHKSGQNLL

SEQ ID NO: 2733 - protein, 16 aa, synthetic construct
TINGHDSPHKSGQLVI

SEQ ID NO: 2734 - protein, 16 aa, synthetic construct
TVNGHDSPHKSRQSQQ

SEQ ID NO: 2735 - protein, 16 aa, synthetic construct
TINGHDSPHKSGRTQE

SEQ ID NO: 2736 - protein, 16 aa, synthetic construct
TINGHDSPHKSVQTHQ

SEQ ID NO: 2737 - protein, 16 aa, synthetic construct
TSNGHDSPHKSGQNQP

SEQ ID NO: 2738 - protein, 16 aa, synthetic construct
VINGHDSPHKSGQTQQ

SEQ ID NO: 2739 - protein, 16 aa, synthetic construct
TINGPDSPHKIGQNQQ

SEQ ID NO: 2740 - protein, 16 aa, synthetic construct
AVNGHDSPHKSVQNQQ

SEQ ID NO: 2741 - protein, 16 aa, synthetic construct
TINGHDSPHKSRQDQH

SEQ ID NO: 2742 - protein, 16 aa, synthetic construct
AINGPDSPHKSGQKQQ

SEQ ID NO: 2743 - protein, 16 aa, synthetic construct
TINGHDSPHKSRQSQH

SEQ ID NO: 2744 - protein, 16 aa, synthetic construct
TIYGHDSPHKSVQNQL

SEQ ID NO: 2745 - protein, 16 aa, synthetic construct
TVNGHDSPHKSGQNLL

SEQ ID NO: 2746 - protein, 16 aa, synthetic construct
TENKSGSPHSKAQNQQ

SEQ ID NO: 2747 - protein, 16 aa, synthetic construct
TTNGQDSPHKSGQNQQ

SEQ ID NO: 2748 - protein, 16 aa, synthetic construct
TDKGSGSPHSKAQNQQ

SEQ ID NO: 2749 - protein, 16 aa, synthetic construct
TIDGHDSPHKSGRNQQ

SEQ ID NO: 2750 - protein, 16 aa, synthetic construct
TINGYDSPHKSGQYQH

SEQ ID NO: 2751 - protein, 16 aa, synthetic construct
TDNGHDSPHKSRQNQQ

SEQ ID NO: 2752 - protein, 16 aa, synthetic construct
TINGHDSPHKSWVRQQ

SEQ ID NO: 2753 - protein, 16 aa, synthetic construct
TINGHESPHKSGQNQH

SEQ ID NO: 2754 - protein, 16 aa, synthetic construct
TVNGHDSPHKIGHNQQ

SEQ ID NO: 2755 - protein, 16 aa, synthetic construct
TCNGHDSPHKSGRNQQ

SEQ ID NO: 2756 - protein, 16 aa, synthetic construct
TINGNGSPHSKAQNHQ

SEQ ID NO: 2757 - protein, 16 aa, synthetic construct
NVVGHDSPHKSGQNQQ

SEQ ID NO: 2758 - protein, 16 aa, synthetic construct
TINGHDSPHKSNAWQQ

SEQ ID NO: 2759 - protein, 16 aa, synthetic construct
TDAGHDSPHKSGQNQQ

SEQ ID NO: 2760 - protein, 16 aa, synthetic construct
TEVGHDSPHKSGQNQQ

SEQ ID NO: 2761 - protein, 16 aa, synthetic construct
SELGHDSPHKSGQNQQ

SEQ ID NO: 2762 - protein, 16 aa, synthetic construct
TINGHDSPHKSGQSVP

SEQ ID NO: 2763 - protein, 16 aa, synthetic construct
TINGHESPHKSGQNIQ

SEQ ID NO: 2764 - protein, 16 aa, synthetic construct
TINGHDSPHKSVQNHL

SEQ ID NO: 2765 - protein, 16 aa, synthetic construct
TINGHDSPHKIGLDQQ

SEQ ID NO: 2766 - protein, 16 aa, synthetic construct
TSNASGSPHSKAQHQQ

SEQ ID NO: 2767 - protein, 16 aa, synthetic construct
TINGHDSPHKRGPDQQ

SEQ ID NO: 2768 - protein, 16 aa, synthetic construct
TINGMGSPHSKTQNQQ

SEQ ID NO: 2769 - protein, 16 aa, synthetic construct
TIKGHDSPHKSGESQQ

SEQ ID NO: 2770 - protein, 16 aa, synthetic construct
TINGHDSPHKHGQNHQ

SEQ ID NO: 2771 - protein, 16 aa, synthetic construct
TVNGTGSPHSKAQNQL

SEQ ID NO: 2772 - protein, 16 aa, synthetic construct
TIIGHDSPHKSGQYQH

SEQ ID NO: 2773 - protein, 16 aa, synthetic construct
TSNGHDSPHKSVQNKQ

SEQ ID NO: 2774 - protein, 16 aa, synthetic construct
IVNGQVSPHKSGQNQQ

SEQ ID NO: 2775 - protein, 16 aa, synthetic construct
TVNGHDSPHKSGQRQL

SEQ ID NO: 2776 - protein, 16 aa, synthetic construct
TVNGHDSPHKIGQNQL

SEQ ID NO: 2777 - protein, 16 aa, synthetic construct
TINGHDSPHKSGQIIV

SEQ ID NO: 2778 - protein, 16 aa, synthetic construct
IGNGHESPHKSGQNQQ

SEQ ID NO: 2779 - protein, 16 aa, synthetic construct
EVMGHDSPHKSGQNQQ

SEQ ID NO: 2780 - protein, 16 aa, synthetic construct
TINGYDSPHKSGQKQS

SEQ ID NO: 2781 - protein, 16 aa, synthetic construct
TIHGNGSPHSKAQNQE

SEQ ID NO: 2782 - protein, 16 aa, synthetic construct
YQVGHDSPHKSGQNQQ

SEQ ID NO: 2783 - protein, 16 aa, synthetic construct
TIKGDDSPHKSVQNQQ

SEQ ID NO: 2784 - protein, 16 aa, synthetic construct
TINGHDSPHKSVQSHQ

SEQ ID NO: 2785 - protein, 16 aa, synthetic construct
TINGHDSPHKSGQFVV

SEQ ID NO: 2786 - protein, 16 aa, synthetic construct
TVNGHDSPHKSRQNLQ

SEQ ID NO: 2787 - protein, 16 aa, synthetic construct
ATNGHNSPHKSGQNQE

SEQ ID NO: 2788 - protein, 16 aa, synthetic construct
AINGHDSPHKSAQNQQ

SEQ ID NO: 2789 - protein, 16 aa, synthetic construct
TEHGHDSPHKSGQNQQ

SEQ ID NO: 2790 - protein, 16 aa, synthetic construct
TIYGHDSPHKSGQSQP

SEQ ID NO: 2791 - protein, 16 aa, synthetic construct
TISGHESPHKSGQNEQ

SEQ ID NO: 2792 - protein, 16 aa, synthetic construct
AIIGHDSPHKSAQNQQ

SEQ ID NO: 2793 - protein, 16 aa, synthetic construct
AIDGHDSPHKSGQNQL

SEQ ID NO: 2794 - protein, 16 aa, synthetic construct
TIMGHDSPHKSVQNQQ

SEQ ID NO: 2795 - protein, 16 aa, synthetic construct
EVGGHDSPHKSGQNQQ

SEQ ID NO: 2796 - protein, 16 aa, synthetic construct
TINGHDSPHKSAQNLL

SEQ ID NO: 2797 - protein, 16 aa, synthetic construct
TINASGSPHSKAINQQ

SEQ ID NO: 2798 - protein, 16 aa, synthetic construct
AINGNGSPHKRGQNQQ

SEQ ID NO: 2799 - protein, 16 aa, synthetic construct
SEMGHDSPHKSGQNQQ

SEQ ID NO: 2800 - protein, 16 aa, synthetic construct
AQQGHDSPHKSGQNQQ

SEQ ID NO: 2801 - protein, 16 aa, synthetic construct
AINGHDSPHKSGQSLQ

SEQ ID NO: 2802 - protein, 16 aa, synthetic construct
TINGSGSPHSKAPNQQ

SEQ ID NO: 2803 - protein, 16 aa, synthetic construct
CGEGHDSPHKSGQNQQ

SEQ ID NO: 2804 - protein, 16 aa, synthetic construct
TVNGHDSPHKSAQNHQ

SEQ ID NO: 2805 - protein, 16 aa, synthetic construct
TVNGHDSPHKSGQTQL

SEQ ID NO: 2806 - protein, 16 aa, synthetic construct
TNNGHDSPHKSGRNRQ

SEQ ID NO: 2807 - protein, 16 aa, synthetic construct
TINGHDSPHKYGQNEQ

SEQ ID NO: 2808 - protein, 16 aa, synthetic construct
TINGNGSPHSKAPNLQ

SEQ ID NO: 2809 - protein, 16 aa, synthetic construct
SINGHDSPHKSQQNQQ

SEQ ID NO: 2810 - protein, 16 aa, synthetic construct
TIGGHDSPHKSGQNQQ

SEQ ID NO: 2811 - protein, 16 aa, synthetic construct
TINGHDSPHKSVQSKQ

SEQ ID NO: 2812 - protein, 16 aa, synthetic construct
ELVGHDSPHKSGQNQQ

SEQ ID NO: 2813 - protein, 16 aa, synthetic construct
ELMGHDSPHKSGQNQQ

SEQ ID NO: 2814 - protein, 16 aa, synthetic construct
TINGNDSPHKIGHNQQ

SEQ ID NO: 2815 - protein, 16 aa, synthetic construct
TIKGGGSPHSKAQDQQ

SEQ ID NO: 2816 - protein, 16 aa, synthetic construct
TVNGHDSPHKSGQTQQ

SEQ ID NO: 2817 - protein, 16 aa, synthetic construct
TINGQDSPHKSGQNPL

SEQ ID NO: 2818 - protein, 16 aa, synthetic construct
TVNASGSPHSKAQNHQ

SEQ ID NO: 2819 - protein, 16 aa, synthetic construct
TINGHDSPHKSGRDQK

SEQ ID NO: 2820 - protein, 16 aa, synthetic construct
TINGHDSPHKSVHNQQ

SEQ ID NO: 2821 - protein, 16 aa, synthetic construct
TINGHDSPHKSGQWKR

SEQ ID NO: 2822 - protein, 16 aa, synthetic construct
TIDGSGSPHSKAENRQ

SEQ ID NO: 2823 - protein, 16 aa, synthetic construct
NEIGHDSPHKSGQNQQ

SEQ ID NO: 2824 - protein, 16 aa, synthetic construct
AINGHDSPHKSGQSQQ

SEQ ID NO: 2825 - protein, 16 aa, synthetic construct
IINGHDSPHKSRQAQQ

SEQ ID NO: 2826 - protein, 16 aa, synthetic construct
TPNGHDSPHKSGQNQQ

SEQ ID NO: 2827 - protein, 16 aa, synthetic construct
ITNGHDSPHKSGQTQQ

SEQ ID NO: 2828 - protein, 16 aa, synthetic construct
TINGHDSPHKSVQNHQ

SEQ ID NO: 2829 - protein, 16 aa, synthetic construct
TINGHDSPHKSKQNQQ

SEQ ID NO: 2830 - protein, 16 aa, synthetic construct
TINGHDSPHKSAQNQL

SEQ ID NO: 2831 - protein, 16 aa, synthetic construct
TVNGHDSPHKSGQTQP

SEQ ID NO: 2832 - protein, 16 aa, synthetic construct
TDQGHDSPHKSGQNQQ

SEQ ID NO: 2833 - protein, 16 aa, synthetic construct
TINGHDSPHKLWINQQ

SEQ ID NO: 2834 - protein, 16 aa, synthetic construct
GINGPDSPHKSGQNQQ

SEQ ID NO: 2835 - protein, 16 aa, synthetic construct
SEIGHDSPHKSGQNQQ

SEQ ID NO: 2836 - protein, 16 aa, synthetic construct
TINGHDSPHKSVQKQL

SEQ ID NO: 2837 - protein, 16 aa, synthetic construct
TINGHPSPHWKGQNQQ

SEQ ID NO: 2838 - protein, 16 aa, synthetic construct
TVNGHDSPHKSGRNQL

SEQ ID NO: 2839 - protein, 16 aa, synthetic construct
TIKGSGSPHSKVQDQQ

SEQ ID NO: 2840 - protein, 16 aa, synthetic construct
SEKGHDSPHKSGQNQQ

SEQ ID NO: 2841 - protein, 16 aa, synthetic construct
WSAGHDSPHKSGQNQQ

SEQ ID NO: 2842 - protein, 16 aa, synthetic construct
ELAGHDSPHKSGQNQQ

SEQ ID NO: 2843 - protein, 16 aa, synthetic construct
TINGHDSPHKMGRNQQ

SEQ ID NO: 2844 - protein, 16 aa, synthetic construct
TINGHDSPHKSGISIQ

SEQ ID NO: 2845 - protein, 16 aa, synthetic construct
TSNGHDSPHKSVQNLQ

SEQ ID NO: 2846 - protein, 16 aa, synthetic construct
QTQGHDSPHKSGQNQQ

SEQ ID NO: 2847 - protein, 16 aa, synthetic construct
TINGHDSPHKMAHNQQ

SEQ ID NO: 2848 - protein, 16 aa, synthetic construct
AINGSGSPHSKAQTQQ

SEQ ID NO: 2849 - protein, 16 aa, synthetic construct
TINGHDSPHKHGQNQQ

SEQ ID NO: 2850 - protein, 16 aa, synthetic construct
GADGHDSPHKSGQNQQ

SEQ ID NO: 2851 - protein, 16 aa, synthetic construct
VGEGHDSPHKSGQNQQ

SEQ ID NO: 2852 - protein, 16 aa, synthetic construct
ANEGHDSPHKSGQNQQ

SEQ ID NO: 2853 - protein, 16 aa, synthetic construct
TEAKSGSPHSKAQNQQ

SEQ ID NO: 2854 - protein, 16 aa, synthetic construct
TINGHDSPHKSVQSQQ

SEQ ID NO: 2855 - protein, 16 aa, synthetic construct
TIPGSGSPHSKAQNLQ

SEQ ID NO: 2856 - protein, 16 aa, synthetic construct
TINGHDSPHKSGQTVC

SEQ ID NO: 2857 - protein, 16 aa, synthetic construct
ELRGHDSPHKSGQNQQ

SEQ ID NO: 2858 - protein, 16 aa, synthetic construct
CQIGHDSPHKSGQNQQ

SEQ ID NO: 2859 - protein, 16 aa, synthetic construct
GVMGHDSPHKSGQNQQ

SEQ ID NO: 2860 - protein, 16 aa, synthetic construct
ACDGHDSPHKSGQNQQ

SEQ ID NO: 2861 - protein, 16 aa, synthetic construct
TINGQDSPHKSGQYQQ

SEQ ID NO: 2862 - protein, 16 aa, synthetic construct
TINGHDSPHKSGQQIM

SEQ ID NO: 2863 - protein, 16 aa, synthetic construct
TINGHDSPHKSRQNEQ

SEQ ID NO: 2864 - protein, 16 aa, synthetic construct
ASNGHDSPHKSGLNHQ

SEQ ID NO: 2865 - protein, 16 aa, synthetic construct
TVNGHDSPHKSGQSQP

SEQ ID NO: 2866 - protein, 16 aa, synthetic construct
NELGHDSPHKSGQNQQ

SEQ ID NO: 2867 - protein, 16 aa, synthetic construct
AAEGHDSPHKSGQNQQ

SEQ ID NO: 2868 - protein, 16 aa, synthetic construct
GQNGHDSPHKSGQNQQ

SEQ ID NO: 2869 - protein, 16 aa, synthetic construct
NEFGHDSPHKSGQNQQ

SEQ ID NO: 2870 - protein, 16 aa, synthetic construct
TSIGYDSPHKSGQNQQ

SEQ ID NO: 2871 - protein, 16 aa, synthetic construct
TDNGHDSPHKSGQNLQ

SEQ ID NO: 2872 - protein, 16 aa, synthetic construct
TITGHDSPHKSRQDQQ

SEQ ID NO: 2873 - protein, 16 aa, synthetic construct
AEHGHDSPHKSGQNQQ

SEQ ID NO: 2874 - protein, 16 aa, synthetic construct
TINGDDSPHKSGQKQL

SEQ ID NO: 2875 - protein, 16 aa, synthetic construct
EILGHDSPHKSGQNQQ

SEQ ID NO: 2876 - protein, 16 aa, synthetic construct
TIHGSGSPHSKAQNQA

SEQ ID NO: 2877 - protein, 16 aa, synthetic construct
AINGDDSPHKSGHNQQ

SEQ ID NO: 2878 - protein, 16 aa, synthetic construct
TSNGHNSPHKSGQNQE

SEQ ID NO: 2879 - protein, 16 aa, synthetic construct
TINGHDSPHKSGQMIH

SEQ ID NO: 2880 - protein, 16 aa, synthetic construct
NAIGHDSPHKSGQNQQ

SEQ ID NO: 2881 - protein, 16 aa, synthetic construct
VINGHDSPHKSGRNHQ

SEQ ID NO: 2882 - protein, 16 aa, synthetic construct
TITGHDSPHKSVQNRQ

SEQ ID NO: 2883 - protein, 16 aa, synthetic construct
TINGHDSPHKSGQKMN

SEQ ID NO: 2884 - protein, 16 aa, synthetic construct
TIHGHDSPHKSGQSQQ

SEQ ID NO: 2885 - protein, 16 aa, synthetic construct
TEIGHDSPHKSGQNQQ

SEQ ID NO: 2886 - protein, 16 aa, synthetic construct
TINGHDSPHKSGQYQH

SEQ ID NO: 2887 - protein, 14 aa, synthetic construct
GSGSPHSKAQNRHT

SEQ ID NO: 2888 - protein, 14 aa, synthetic construct
GSGSPHSKVQNQQT

SEQ ID NO: 2889 - protein, 14 aa, synthetic construct
MSGSPHSKAQNQQT

SEQ ID NO: 2890 - protein, 14 aa, synthetic construct
GSGSPHSKARDQQT

SEQ ID NO: 2891 - protein, 14 aa, synthetic construct
GSGSPHSKAPNLQT

SEQ ID NO: 2892 - protein, 14 aa, synthetic construct
TSGSPHSKAQNQQT

SEQ ID NO: 2893 - protein, 14 aa, synthetic construct
GSGSPHSKAHVRQT

SEQ ID NO: 2894 - protein, 14 aa, synthetic construct
GSGSPHSKAPNQHT

SEQ ID NO: 2895 - protein, 14 aa, synthetic construct
ISGSPHSKAQNQQT

SEQ ID NO: 2896 - protein, 14 aa, synthetic construct
GSGSPHSKTQSQQT

SEQ ID NO: 2897 - skipped

SEQ ID NO: 2898 - protein, 14 aa, synthetic construct
ESGSPHSKAQNQQI

SEQ ID NO: 2899 - protein, 14 aa, synthetic construct
GSGSPHSKAQPAKT

SEQ ID NO: 2900 - protein, 14 aa, synthetic construct
SSGSPHSKAQNQQT

SEQ ID NO: 2901 - protein, 14 aa, synthetic construct
GSGSPHSKSQTQQN

SEQ ID NO: 2902 - protein, 14 aa, synthetic construct
ASGSPHSKAQNQQT

SEQ ID NO: 2903 - protein, 14 aa, synthetic construct
GSGSPHSKAQNLAT

SEQ ID NO: 2904 - protein, 14 aa, synthetic construct
GSGSPHSKSQNQLT

SEQ ID NO: 2905 - protein, 14 aa, synthetic construct
NSGSPHSKAQNQQT

SEQ ID NO: 2906 - protein, 14 aa, synthetic construct
GSGSPHSKAQGQQT

SEQ ID NO: 2907 - protein, 14 aa, synthetic construct
VSGSPHSKAQNQQT

SEQ ID NO: 2908 - protein, 14 aa, synthetic construct
GSGSPHSKALNRQS

SEQ ID NO: 2909 - protein, 14 aa, synthetic construct
LSGSPHSKAQNQQT

SEQ ID NO: 2910 - protein, 14 aa, synthetic construct
GSGSPHSKAHNQQT

SEQ ID NO: 2911 - protein, 14 aa, synthetic construct
GSGSPHSKTQNQQT

SEQ ID NO: 2912 - protein, 14 aa, synthetic construct
GSGSPHSKAQNPPT

SEQ ID NO: 2913 - protein, 14 aa, synthetic construct
GSGSPHSKAQNLQT

SEQ ID NO: 2914 - protein, 14 aa, synthetic construct
GSGSPHSKAQYQQT

SEQ ID NO: 2915 - protein, 14 aa, synthetic construct
GSGSPHSKAQDQET

SEQ ID NO: 2916 - protein, 14 aa, synthetic construct
KSGSPHSKAQNQQT

SEQ ID NO: 2917 - protein, 14 aa, synthetic construct
GSGSPHSKAQNHQT

SEQ ID NO: 2918 - protein, 14 aa, synthetic construct
GSGSPHSKAQDQQT

SEQ ID NO: 2919 - protein, 14 aa, synthetic construct
GSGSPHSKGHWQQT

SEQ ID NO: 2920 - protein, 14 aa, synthetic construct
GSGSPHSKAPNQQT

SEQ ID NO: 2921 - protein, 14 aa, synthetic construct
GSGSPHSKAQNQLI

SEQ ID NO: 2922 - protein, 14 aa, synthetic construct
GSGSPHSKRPEQQT

SEQ ID NO: 2923 - protein, 14 aa, synthetic construct
GSGSPHSKAQRTMT

SEQ ID NO: 2924 - protein, 14 aa, synthetic construct
GSGSPHSKAQNQQH

SEQ ID NO: 2925 - protein, 14 aa, synthetic construct
HSGSPHSKAQNQQT

SEQ ID NO: 2926 - protein, 14 aa, synthetic construct
GSGSPHSKALHQHT

SEQ ID NO: 2927 - protein, 14 aa, synthetic construct
GSGSPHSKAQHRIT

SEQ ID NO: 2928 - protein, 14 aa, synthetic construct
GSGSPHSKAQYIHT

SEQ ID NO: 2929 - protein, 14 aa, synthetic construct
GSGSPHSKAQKFET

SEQ ID NO: 2930 - protein, 14 aa, synthetic construct
ESGSPHSKAQNHQT

SEQ ID NO: 2931 - protein, 14 aa, synthetic construct
GSGSPHSKAQFPST

SEQ ID NO: 2932 - protein, 14 aa, synthetic construct
PSGSPHSKAQNQQT

SEQ ID NO: 2933 - protein, 14 aa, synthetic construct
GSGSPHSKAHNQQR

SEQ ID NO: 2934 - protein, 14 aa, synthetic construct
GSGSPHSKAQAIKT

SEQ ID NO: 2935 - protein, 14 aa, synthetic construct
GSGSPHSKGQNRQT

SEQ ID NO: 2936 - protein, 14 aa, synthetic construct
GSGSPHSKAQSQQT

SEQ ID NO: 2937 - protein, 14 aa, synthetic construct
ASGSPHSKAQNQLT

SEQ ID NO: 2938 - protein, 14 aa, synthetic construct
RSGSPHSKAQNQQT

SEQ ID NO: 2939 - protein, 14 aa, synthetic construct
GSGSPHSKAQYQHT

SEQ ID NO: 2940 - protein, 14 aa, synthetic construct
GSGSPHTKAQNPQS

SEQ ID NO: 2941 - protein, 14 aa, synthetic construct
GSGSPHSKGQNPPT

SEQ ID NO: 2942 - protein, 14 aa, synthetic construct
GSGSPHSKAQHQLT

SEQ ID NO: 2943 - protein, 14 aa, synthetic construct
GSGSPHSKAQSPPT

SEQ ID NO: 2944 - protein, 14 aa, synthetic construct
GSGSPHSKAQAKLT

SEQ ID NO: 2945 - protein, 14 aa, synthetic construct
GSGSPHSKTKSQQT

SEQ ID NO: 2946 - protein, 14 aa, synthetic construct
GSGSPHSKAQDRPT

SEQ ID NO: 2947 - protein, 14 aa, synthetic construct
GSGSPHSKAQSQQL

SEQ ID NO: 2948 - protein, 14 aa, synthetic construct
GSGSPHSKAQAFHT

SEQ ID NO: 2949 - protein, 14 aa, synthetic construct
GSGSPHSKAQKQQD

SEQ ID NO: 2950 - protein, 14 aa, synthetic construct
GSGSPHSKAQNAQT

SEQ ID NO: 2951 - protein, 14 aa, synthetic construct
WSGSPHSKAQNQQT

SEQ ID NO: 2952 - protein, 14 aa, synthetic construct
GSGSPHSKAHNQLT

SEQ ID NO: 2953 - protein, 14 aa, synthetic construct
GSGSPHSKAQNQQY

SEQ ID NO: 2954 - protein, 14 aa, synthetic construct
GSGSPHSKAQKLNT

SEQ ID NO: 2955 - protein, 14 aa, synthetic construct
GSGSPHSKSQNVQT

SEQ ID NO: 2956 - protein, 14 aa, synthetic construct
GSGSPHSKAQAQQT

SEQ ID NO: 2957 - protein, 14 aa, synthetic construct
GSGSPHSKAQNLQA

SEQ ID NO: 2958 - protein, 14 aa, synthetic construct
DSGSPHSKAQNQQT

SEQ ID NO: 2959 - protein, 14 aa, synthetic construct
ASGSPHSKAPNQQT

SEQ ID NO: 2960 - protein, 14 aa, synthetic construct
GSGSPHSKAQTPPT

SEQ ID NO: 2961 - protein, 14 aa, synthetic construct
GSGSPHSKAQYQHA

SEQ ID NO: 2962 - protein, 14 aa, synthetic construct
GSGSPHSKAQGQQA

SEQ ID NO: 2963 - protein, 14 aa, synthetic construct
GSGSPHNKAQNHQT

SEQ ID NO: 2964 - protein, 14 aa, synthetic construct
GSGSPHSKAQPPAT

SEQ ID NO: 2965 - protein, 14 aa, synthetic construct
GSGSPHSKAQERPT

SEQ ID NO: 2966 - protein, 14 aa, synthetic construct
GSGSPHSKAQDLQT

SEQ ID NO: 2967 - protein, 14 aa, synthetic construct
GSGSPHSKAQAMHT

SEQ ID NO: 2968 - protein, 14 aa, synthetic construct
GSGSPHSKALNQQT

SEQ ID NO: 2969 - protein, 14 aa, synthetic construct
GSGSPHSKAQHPST

SEQ ID NO: 2970 - protein, 14 aa, synthetic construct
GSGSPHSKAPGLQT

SEQ ID NO: 2971 - protein, 14 aa, synthetic construct
GSGSPHSKAQGIRT

SEQ ID NO: 2972 - protein, 14 aa, synthetic construct
GSGSPHSKAQAPAT

SEQ ID NO: 2973 - protein, 14 aa, synthetic construct
GSGSPHSKSQSQQI

SEQ ID NO: 2974 - protein, 14 aa, synthetic construct
GSGSPHSKAQIPPT

SEQ ID NO: 2975 - protein, 14 aa, synthetic construct
GSGSPHSKAQTQLT

SEQ ID NO: 2976 - protein, 14 aa, synthetic construct
GSGSPHSKAQAPST

SEQ ID NO: 2977 - protein, 14 aa, synthetic construct
GSGSPHSKGQNQQT

SEQ ID NO: 2978 - protein, 14 aa, synthetic construct
ASGSPHSKAHNQQT

SEQ ID NO: 2979 - protein, 14 aa, synthetic construct
GSGSPHSKAQNTYA

SEQ ID NO: 2980 - protein, 14 aa, synthetic construct
GSGSPHSKSQNQHI

SEQ ID NO: 2981 - protein, 14 aa, synthetic construct
GSGSPHSKAQNHLT

SEQ ID NO: 2982 - protein, 14 aa, synthetic construct
GSGSPHSKAQIGMT

SEQ ID NO: 2983 - protein, 14 aa, synthetic construct
GSGSPHSKALNKQT

SEQ ID NO: 2984 - protein, 14 aa, synthetic construct
GSGSPHSKAQLQQT

SEQ ID NO: 2985 - protein, 14 aa, synthetic construct
GSGSPHSKAQRMST

SEQ ID NO: 2986 - protein, 14 aa, synthetic construct
GSGSPHSKAQGILT

SEQ ID NO: 2987 - protein, 14 aa, synthetic construct
GSGSPHSKAQDRQT

SEQ ID NO: 2988 - protein, 14 aa, synthetic construct
GSGSPHSKARDWQT

SEQ ID NO: 2989 - protein, 14 aa, synthetic construct
GSGSPHSKAQNTHD

SEQ ID NO: 2990 - protein, 14 aa, synthetic construct
GSGSPHSKAPNLQI

SEQ ID NO: 2991 - protein, 14 aa, synthetic construct
GSGSPHSKAQERST

SEQ ID NO: 2992 - protein, 14 aa, synthetic construct
GSGSPHSKAQNYQT

SEQ ID NO: 2993 - protein, 14 aa, synthetic construct
GSGSPHSKAQRTCT

SEQ ID NO: 2994 - protein, 14 aa, synthetic construct
GSGSPHSKAQIGHT

SEQ ID NO: 2995 - protein, 14 aa, synthetic construct
GSGSPHSKAQGAIT

SEQ ID NO: 2996 - protein, 14 aa, synthetic construct
GSGSPHSKAQVPPT

SEQ ID NO: 2997 - protein, 14 aa, synthetic construct
GSGSPHSKAQVQQI

SEQ ID NO: 2998 - protein, 14 aa, synthetic construct
GSGSPHSKALMRQT

SEQ ID NO: 2999 - protein, 14 aa, synthetic construct
GSGSPHSKAQYSVT

SEQ ID NO: 3000 - protein, 14 aa, synthetic construct
GSGSPHSKVPNLQT

SEQ ID NO: 3001 - protein, 14 aa, synthetic construct
GSGSPHSKAQSQQI

SEQ ID NO: 3002 - protein, 14 aa, synthetic construct
GSGSPHSKAQAITT

SEQ ID NO: 3003 - protein, 14 aa, synthetic construct
GSGSPHSKAQKTLT

SEQ ID NO: 3004 - protein, 14 aa, synthetic construct
GSGSPHSKAQNQWT

SEQ ID NO: 3005 - protein, 14 aa, synthetic construct
GSGSPHSKAQLHHT

SEQ ID NO: 3006 - protein, 14 aa, synthetic construct
GSGSPHSKAQNIII

SEQ ID NO: 3007 - protein, 14 aa, synthetic construct
GSGSPHSKAQGHHT

SEQ ID NO: 3008 - protein, 14 aa, synthetic construct
GSGSPHSKAQSKVT

SEQ ID NO: 3009 - protein, 14 aa, synthetic construct
GSGSPHSKAQLPST

SEQ ID NO: 3010 - protein, 14 aa, synthetic construct
GSGSPHSKAIGKQT

SEQ ID NO: 3011 - protein, 14 aa, synthetic construct
GSGSPHSKAQAIHT

SEQ ID NO: 3012 - protein, 14 aa, synthetic construct
GSGSPHSKAQHGLT

SEQ ID NO: 3013 - protein, 14 aa, synthetic construct
GSGSPHSKAQFMCT

SEQ ID NO: 3014 - protein, 14 aa, synthetic construct
VSGSPHSKAQGQQT

SEQ ID NO: 3015 - protein, 14 aa, synthetic construct
GSGSPHSKAQHLQT

SEQ ID NO: 3016 - protein, 14 aa, synthetic construct
GSGSPHSKTQNHQN

SEQ ID NO: 3017 - protein, 14 aa, synthetic construct
GSGSPHSKAQPART

SEQ ID NO: 3018 - protein, 14 aa, synthetic construct
GSGSPHSKAQSLQT

SEQ ID NO: 3019 - protein, 14 aa, synthetic construct
GSGSPHSKSQSQLT

SEQ ID NO: 3020 - protein, 14 aa, synthetic construct
GSGSPHSKAQDRQS

SEQ ID NO: 3021 - protein, 14 aa, synthetic construct
GSGSPHSKAQMPST

SEQ ID NO: 3022 - protein, 14 aa, synthetic construct
GSGSPHSKAQGSLT

SEQ ID NO: 3023 - protein, 14 aa, synthetic construct
GSGSPHSKSQNQQT

SEQ ID NO: 3024 - protein, 14 aa, synthetic construct
GSGSPHSKAQVPAT

SEQ ID NO: 3025 - protein, 14 aa, synthetic construct
GSGSPHSKAQDKQT

SEQ ID NO: 3026 - protein, 14 aa, synthetic construct
GSGSPHSKAHYQQT

SEQ ID NO: 3027 - protein, 14 aa, synthetic construct
GSGSPHSKAQVPST

SEQ ID NO: 3028 - protein, 14 aa, synthetic construct
GSGSPHSKARGEQT

SEQ ID NO: 3029 - protein, 14 aa, synthetic construct
GSGSPHSKAPGQQT

SEQ ID NO: 3030 - protein, 14 aa, synthetic construct
GSGSPHSKAQSLQI

SEQ ID NO: 3031 - protein, 14 aa, synthetic construct
GSGSPHSKRLEQQT

SEQ ID NO: 3032 - protein, 14 aa, synthetic construct
GSGSPHSKAQNQST

SEQ ID NO: 3033 - protein, 14 aa, synthetic construct
GSGSPHSKAQKVIT

SEQ ID NO: 3034 - protein, 14 aa, synthetic construct
GSGSPHSKAQNNDQ

SEQ ID NO: 3035 - protein, 14 aa, synthetic construct
GSGSPHSKAQSVHT

SEQ ID NO: 3036 - protein, 14 aa, synthetic construct
GSGSPHSKAQPLGT

SEQ ID NO: 3037 - protein, 14 aa, synthetic construct
GSGSPHSKAHNQET

SEQ ID NO: 3038 - protein, 14 aa, synthetic construct
GSGSPHSKAQNLQI

SEQ ID NO: 3039 - protein, 14 aa, synthetic construct
GSGSPHSKAQIQQT

SEQ ID NO: 3040 - protein, 14 aa, synthetic construct
GSGSPHSKAQVRNT

SEQ ID NO: 3041 - protein, 14 aa, synthetic construct
GSGSPHSKAPSNQT

SEQ ID NO: 3042 - protein, 14 aa, synthetic construct
GSGSPHSKAQVGHT

SEQ ID NO: 3043 - protein, 14 aa, synthetic construct
GSGSPHSKAQRDIT

SEQ ID NO: 3044 - protein, 14 aa, synthetic construct
GSGSPHSKAQMPNT

SEQ ID NO: 3045 - protein, 14 aa, synthetic construct
GSGSPHSKARGLQT

SEQ ID NO: 3046 - protein, 14 aa, synthetic construct
GSGSPHSKLQKQQT

SEQ ID NO: 3047 - protein, 14 aa, synthetic construct
GSGSPHSKAPSLQT

SEQ ID NO: 3048 - protein, 14 aa, synthetic construct
GSGSPHSKAQRDQT

SEQ ID NO: 3049 - protein, 14 aa, synthetic construct
GSGSPHSKNRDQQT

SEQ ID NO: 3050 - protein, 14 aa, synthetic construct
GSGSPHSKAQAKGT

SEQ ID NO: 3051 - protein, 14 aa, synthetic construct
GSGSPHSKAQSAHT

SEQ ID NO: 3052 - protein, 14 aa, synthetic construct
GSGSPHSKSQNHQT

SEQ ID NO: 3053 - protein, 14 aa, synthetic construct
RSGSPHSKAQDQQT

SEQ ID NO: 3054 - protein, 14 aa, synthetic construct
GSGSPHSKAQSTMT

SEQ ID NO: 3055 - protein, 14 aa, synthetic construct
GSGSPHSKAQREMT

SEQ ID NO: 3056 - protein, 14 aa, synthetic construct
GSGSPHSKAQYRAT

SEQ ID NO: 3057 - protein, 14 aa, synthetic construct
GSGSPHSKNQWQQT

SEQ ID NO: 3058 - protein, 14 aa, synthetic construct
GSGSPHSKAQRMNT

SEQ ID NO: 3059 - protein, 14 aa, synthetic construct
GSGSPHAKAQNHQT

SEQ ID NO: 3060 - protein, 14 aa, synthetic construct
GSGSPHSKAGDSQT

SEQ ID NO: 3061 - protein, 14 aa, synthetic construct
GSGSPHSKLKSQQT

SEQ ID NO: 3062 - protein, 14 aa, synthetic construct
GSGSPHSKAQKIST

SEQ ID NO: 3063 - protein, 14 aa, synthetic construct
GSGSPHSKAPSMQT

SEQ ID NO: 3064 - protein, 14 aa, synthetic construct
GSGSPHSKASPRQT

SEQ ID NO: 3065 - protein, 14 aa, synthetic construct
GSGSPHSKRMEQQT

SEQ ID NO: 3066 - protein, 14 aa, synthetic construct
GSGSPHSKAQYQNT

SEQ ID NO: 3067 - protein, 14 aa, synthetic construct
RSGSPHSKAQNQQI

SEQ ID NO: 3068 - protein, 14 aa, synthetic construct
GSGSPHTKAQNPPT

SEQ ID NO: 3069 - protein, 14 aa, synthetic construct
GSGSPHTKAQNQQT

SEQ ID NO: 3070 - protein, 14 aa, synthetic construct
ASGSPHSKAQHQQT

SEQ ID NO: 3071 - protein, 14 aa, synthetic construct
ASGSPHSKAINQQT

SEQ ID NO: 3072 - protein, 14 aa, synthetic construct
GSGSPHSKAPNQQH

SEQ ID NO: 3073 - protein, 14 aa, synthetic construct
ASGSPHSKAQNHQT

SEQ ID NO: 3074 - protein, 14 aa, synthetic construct
GSGSPHSKAENRQT

SEQ ID NO: 3075 - protein, 14 aa, synthetic construct
GSGSPHSKVQDQQT

SEQ ID NO: 3076 - protein, 14 aa, synthetic construct
GSGSPHSKAQTQQA

SEQ ID NO: 3077 - protein, 14 aa, synthetic construct
GSGSPHSKAQNQAT

SEQ ID NO: 3078 - protein, 14 aa, synthetic construct
GHDSPHKSGQIRQT

SEQ ID NO: 3079 - protein, 14 aa, synthetic construct
GHDSPHKIGQNQHA

SEQ ID NO: 3080 - protein, 14 aa, synthetic construct
GYDSPHKSGQKQQT

SEQ ID NO: 3081 - protein, 14 aa, synthetic construct
GHDSPHKSGQNQQT

SEQ ID NO: 3082 - protein, 14 aa, synthetic construct
GHDSPHKSGQSVQT

SEQ ID NO: 3083 - protein, 14 aa, synthetic construct
GHESPHKSGRSQQT

SEQ ID NO: 3084 - protein, 14 aa, synthetic construct
GHDSPHKSGQNKLE

SEQ ID NO: 3085 - protein, 14 aa, synthetic construct
GHDSPHKTGQNQQK

SEQ ID NO: 3086 - protein, 14 aa, synthetic construct
GRGSPHKRGQNQQT

SEQ ID NO: 3087 - protein, 14 aa, synthetic construct
GHDNPHKSGQNQQT

SEQ ID NO: 3088 - protein, 14 aa, synthetic construct
GQDSPHKSGQHQQA

SEQ ID NO: 3089 - protein, 14 aa, synthetic construct
GHDSPHKSGQIQHT

SEQ ID NO: 3090 - protein, 14 aa, synthetic construct
GHDSPHKSGPRQQT

SEQ ID NO: 3091 - protein, 14 aa, synthetic construct
GHDSPHKSGHTQQT

SEQ ID NO: 3092 - protein, 14 aa, synthetic construct
GHDSPHKSGQRQHT

SEQ ID NO: 3093 - protein, 14 aa, synthetic construct
GHDSPHKSAQSQQT

SEQ ID NO: 3094 - protein, 14 aa, synthetic construct
GHESPHKSGQNQQS

SEQ ID NO: 3095 - protein, 14 aa, synthetic construct
GHDSPHKSLQNQQT

SEQ ID NO: 3096 - protein, 14 aa, synthetic construct
GHDSPHKSGRNQET

SEQ ID NO: 3097 - protein, 14 aa, synthetic construct
GHDSPHKSGQTQLT

SEQ ID NO: 3098 - protein, 14 aa, synthetic construct
GHDSPHKSEKNQQT

SEQ ID NO: 3099 - protein, 14 aa, synthetic construct
GRDSPHKSGQDQQT

SEQ ID NO: 3100 - protein, 14 aa, synthetic construct
GHDSPHKTGHNQQT

SEQ ID NO: 3101 - protein, 14 aa, synthetic construct
AHDSPHKSGQNQLT

SEQ ID NO: 3102 - protein, 14 aa, synthetic construct
GYDSPHKSGQTQQT

SEQ ID NO: 3103 - protein, 14 aa, synthetic construct
GHESPHKSGQTQQI

SEQ ID NO: 3104 - protein, 14 aa, synthetic construct
GHDSPHKSGQSKQA

SEQ ID NO: 3105 - protein, 14 aa, synthetic construct
GHESPHKSGQNQQT

SEQ ID NO: 3106 - protein, 14 aa, synthetic construct
GHDSPHKTGQNQPP

SEQ ID NO: 3107 - protein, 14 aa, synthetic construct
GHDSPHKSGQSPQT

SEQ ID NO: 3108 - protein, 14 aa, synthetic construct
GNDSPHKSVQNQQT

SEQ ID NO: 3109 - protein, 14 aa, synthetic construct
GHDSPHKSAQNYQT

SEQ ID NO: 3110 - protein, 14 aa, synthetic construct
AHDSPHKIGQNHQT

SEQ ID NO: 3111 - protein, 14 aa, synthetic construct
GHESPHKSAQNRQT

SEQ ID NO: 3112 - protein, 14 aa, synthetic construct
GHDSPHKSGQNQQG

SEQ ID NO: 3113 - protein, 14 aa, synthetic construct
GQDSPHKIGQNQQT

SEQ ID NO: 3114 - protein, 14 aa, synthetic construct
GHDSPHKSGQNHLT

SEQ ID NO: 3115 - protein, 14 aa, synthetic construct
GHDSPHKSGQYQHT

SEQ ID NO: 3116 - protein, 14 aa, synthetic construct
GNDSPHKSVQNHQT

SEQ ID NO: 3117 - protein, 14 aa, synthetic construct
GHDSPHKSGQNQWT

SEQ ID NO: 3118 - protein, 14 aa, synthetic construct
GHDSPHKSVQNQHT

SEQ ID NO: 3119 - protein, 14 aa, synthetic construct
GHDSPHKSGQNQHA

SEQ ID NO: 3120 - protein, 14 aa, synthetic construct
GHDSPHKSGQTRQT

SEQ ID NO: 3121 - protein, 14 aa, synthetic construct
GHDSPHKSGQNLHT

SEQ ID NO: 3122 - protein, 14 aa, synthetic construct
GHDSPHKSGLNQQT

SEQ ID NO: 3123 - protein, 14 aa, synthetic construct
GHDSPHKSAQNQET

SEQ ID NO: 3124 - protein, 14 aa, synthetic construct
GHDSPHKSGQHLQT

SEQ ID NO: 3125 - protein, 14 aa, synthetic construct
GHDSPHKSRLNQPT

SEQ ID NO: 3126 - protein, 14 aa, synthetic construct
GHDSPHKSGQKQQT

SEQ ID NO: 3127 - protein, 14 aa, synthetic construct
GQDSPHKSGQNQDT

SEQ ID NO: 3128 - protein, 14 aa, synthetic construct
GHDSPHKSGRNQQT

SEQ ID NO: 3129 - protein, 14 aa, synthetic construct
GHDSPHKSGQNLLT

SEQ ID NO: 3130 - protein, 14 aa, synthetic construct
GHDSPHKSGQLVIT

SEQ ID NO: 3131 - protein, 14 aa, synthetic construct
GHDSPHKSRQSQQT

SEQ ID NO: 3132 - protein, 14 aa, synthetic construct
GHDSPHKSGRTQET

SEQ ID NO: 3133 - protein, 14 aa, synthetic construct
GHDSPHKSVQTHQT

SEQ ID NO: 3134 - protein, 14 aa, synthetic construct
GHDSPHKSGQNQPA

SEQ ID NO: 3135 - protein, 14 aa, synthetic construct
KHDSPHKSGQNQQT

SEQ ID NO: 3136 - protein, 14 aa, synthetic construct
GHDSPHKSGQTQQT

SEQ ID NO: 3137 - protein, 14 aa, synthetic construct
GPDSPHKIGQNQQS

SEQ ID NO: 3138 - protein, 14 aa, synthetic construct
GHDSPHKSVQNQQT

SEQ ID NO: 3139 - protein, 14 aa, synthetic construct
GHDSPHKSRQDQHT

SEQ ID NO: 3140 - protein, 14 aa, synthetic construct
GPDSPHKSGQKQQT

SEQ ID NO: 3141 - protein, 14 aa, synthetic construct
GHDSPHKSRQSQHT

SEQ ID NO: 3142 - protein, 14 aa, synthetic construct
GHDSPHKSVQNQLT

SEQ ID NO: 3143 - protein, 14 aa, synthetic construct
AHDSPHKSGQNQQT

SEQ ID NO: 3144 - protein, 14 aa, synthetic construct
GQDSPHKSGQNQQS

SEQ ID NO: 3145 - protein, 14 aa, synthetic construct
GHDSPHKSGRNQQI

SEQ ID NO: 3146 - protein, 14 aa, synthetic construct
GYDSPHKSGQYQHT

SEQ ID NO: 3147 - protein, 14 aa, synthetic construct
GHDSPHKSRQNQQT

SEQ ID NO: 3148 - protein, 14 aa, synthetic construct
GHDSPHKSWVRQQT

SEQ ID NO: 3149 - protein, 14 aa, synthetic construct
GHESPHKSGQNQHS

SEQ ID NO: 3150 - protein, 14 aa, synthetic construct
GHDSPHKIGHNQQT

SEQ ID NO: 3151 - protein, 14 aa, synthetic construct
WHDSPHKSGQNQQT

SEQ ID NO: 3152 - protein, 14 aa, synthetic construct
RHDSPHKSGQNQQT

SEQ ID NO: 3153 - protein, 14 aa, synthetic construct
GHDSPHKSNAWQQT

SEQ ID NO: 3154 - protein, 14 aa, synthetic construct
GHDSPHKSGQSVPT

SEQ ID NO: 3155 - protein, 14 aa, synthetic construct
GHESPHKSGQNIQP

SEQ ID NO: 3156 - protein, 14 aa, synthetic construct
GHDSPHKSVQNHLN

SEQ ID NO: 3157 - protein, 14 aa, synthetic construct
GHDSPHKIGLDQQT

SEQ ID NO: 3158 - protein, 14 aa, synthetic construct
GHDSPHKRGPDQQS

SEQ ID NO: 3159 - protein, 14 aa, synthetic construct
GHDSPHKSGESQQT

SEQ ID NO: 3160 - protein, 14 aa, synthetic construct
GHDSPHKHGQNHQT

SEQ ID NO: 3161 - protein, 14 aa, synthetic construct
LHDSPHKSGQNQQT

SEQ ID NO: 3162 - protein, 14 aa, synthetic construct
GHDSPHKSVQNKQT

SEQ ID NO: 3163 - protein, 14 aa, synthetic construct
GQVSPHKSGQNQQT

SEQ ID NO: 3164 - protein, 14 aa, synthetic construct
GHDSPHKSGQRQLT

SEQ ID NO: 3165 - protein, 14 aa, synthetic construct
GHDSPHKIGQNQLT

SEQ ID NO: 3166 - protein, 14 aa, synthetic construct
GHDSPHKSGQIIVT

SEQ ID NO: 3167 - protein, 14 aa, synthetic construct
IHDSPHKSGQNQQT

SEQ ID NO: 3168 - protein, 14 aa, synthetic construct
GYDSPHKSGQKQST

SEQ ID NO: 3169 - protein, 14 aa, synthetic construct
MHDSPHKSGQNQQT

SEQ ID NO: 3170 - protein, 14 aa, synthetic construct
GDDSPHKSVQNQQT

SEQ ID NO: 3171 - protein, 14 aa, synthetic construct
GHDSPHKSVQSHQT

SEQ ID NO: 3172 - protein, 14 aa, synthetic construct
GHDSPHKSGQFVVT

SEQ ID NO: 3173 - protein, 14 aa, synthetic construct
GHDSPHKSRQNLQT

SEQ ID NO: 3174 - protein, 14 aa, synthetic construct
GHNSPHKSGQNQET

SEQ ID NO: 3175 - protein, 14 aa, synthetic construct
GHDSPHKSAQNQQI

SEQ ID NO: 3176 - protein, 14 aa, synthetic construct
NHDSPHKSGQNQQT

SEQ ID NO: 3177 - protein, 14 aa, synthetic construct
GHDSPHKSGQSQPT

SEQ ID NO: 3178 - protein, 14 aa, synthetic construct
GHESPHKSGQNEQT

SEQ ID NO: 3179 - protein, 14 aa, synthetic construct
GHDSPHKSAQNQQT

SEQ ID NO: 3180 - protein, 14 aa, synthetic construct
GHDSPHKSGQNQLT

SEQ ID NO: 3181 - protein, 14 aa, synthetic construct
GHDSPHKSAQNLLT

SEQ ID NO: 3182 - protein, 14 aa, synthetic construct
THDSPHKSGQNQQT

SEQ ID NO: 3183 - protein, 14 aa, synthetic construct
GNGSPHKRGQNQQT

SEQ ID NO: 3184 - protein, 14 aa, synthetic construct
GHDSPHKSGQSLQT

SEQ ID NO: 3185 - protein, 14 aa, synthetic construct
GHDSPHKSAQNHQT

SEQ ID NO: 3186 - protein, 14 aa, synthetic construct
GHDSPHKSGRNRQT

SEQ ID NO: 3187 - protein, 14 aa, synthetic construct
EHDSPHKSGQNQQT

SEQ ID NO: 3188 - protein, 14 aa, synthetic construct
GHDSPHKYGQNEQT

SEQ ID NO: 3189 - protein, 14 aa, synthetic construct
RHDSPHKSGHNQQT

SEQ ID NO: 3190 - protein, 14 aa, synthetic construct
GHDSPHKSQQNQQT

SEQ ID NO: 3191 - protein, 14 aa, synthetic construct
GHDSPHKSGQNQQI

SEQ ID NO: 3192 - protein, 14 aa, synthetic construct
QHDSPHKSGQNQQT

SEQ ID NO: 3193 - protein, 14 aa, synthetic construct
RHDSPHKIVQNQQT

SEQ ID NO: 3194 - protein, 14 aa, synthetic construct
YHDSPHKSGQNQQT

SEQ ID NO: 3195 - protein, 14 aa, synthetic construct
GHDSPHKSVQSKQT

SEQ ID NO: 3196 - protein, 14 aa, synthetic construct
GNDSPHKIGHNQQT

SEQ ID NO: 3197 - protein, 14 aa, synthetic construct
HHDSPHKSGQNQQT

SEQ ID NO: 3198 - protein, 14 aa, synthetic construct
GHDSPHKSGQTQQI

SEQ ID NO: 3199 - protein, 14 aa, synthetic construct
GQDSPHKSGQNPLT

SEQ ID NO: 3200 - protein, 14 aa, synthetic construct
GHDSPHKSGRDQKT

SEQ ID NO: 3201 - protein, 14 aa, synthetic construct
GHDSPHKSVHNQQN

SEQ ID NO: 3202 - protein, 14 aa, synthetic construct
GHDSPHKSGQWKRT

SEQ ID NO: 3203 - protein, 14 aa, synthetic construct
GHDSPHKSGQSQQI

SEQ ID NO: 3204 - protein, 14 aa, synthetic construct
GHDSPHKSRQAQQT

SEQ ID NO: 3205 - protein, 14 aa, synthetic construct
GHDSPHKSVQNHQI

SEQ ID NO: 3206 - protein, 14 aa, synthetic construct
GHDSPHKSKQNQQA

SEQ ID NO: 3207 - protein, 14 aa, synthetic construct
GHDSPHKSAQNQLN

SEQ ID NO: 3208 - protein, 14 aa, synthetic construct
GHDSPHKSGQTQPT

SEQ ID NO: 3209 - protein, 14 aa, synthetic construct
FHDSPHKSGQNQQT

SEQ ID NO: 3210 - protein, 14 aa, synthetic construct
GHDSPHKLWINQQT

SEQ ID NO: 3211 - protein, 14 aa, synthetic construct
GPDSPHKSGQNQQT

SEQ ID NO: 3212 - protein, 14 aa, synthetic construct
GHDSPHKSVQKQLT

SEQ ID NO: 3213 - protein, 14 aa, synthetic construct
GHDSPHKSGRNQLA

SEQ ID NO: 3214 - protein, 14 aa, synthetic construct
VHDSPHKSGQNQQS

SEQ ID NO: 3215 - protein, 14 aa, synthetic construct
GHDSPHKMGRNQQS

SEQ ID NO: 3216 - protein, 14 aa, synthetic construct
GHDSPHKSGISIQT

SEQ ID NO: 3217 - protein, 14 aa, synthetic construct
VHDSPHKSGQNQQT

SEQ ID NO: 3218 - protein, 14 aa, synthetic construct
GHDSPHKSVQNLQT

SEQ ID NO: 3219 - protein, 14 aa, synthetic construct
GHDSPHKMAHNQQT

SEQ ID NO: 3220 - protein, 14 aa, synthetic construct
GHDSPHKHGQNQQN

SEQ ID NO: 3221 - protein, 14 aa, synthetic construct
GHDSPHKSVQSQQS

SEQ ID NO: 3222 - protein, 14 aa, synthetic construct
GHDSPHKSGQTVCT

SEQ ID NO: 3223 - protein, 14 aa, synthetic construct
GQDSPHKSGQYQQI

SEQ ID NO: 3224 - protein, 14 aa, synthetic construct
GHDSPHKSGQQIMT

SEQ ID NO: 3225 - protein, 14 aa, synthetic construct
GHDSPHKSRQNEQS

SEQ ID NO: 3226 - protein, 14 aa, synthetic construct
GHDSPHKSGLNHQT

SEQ ID NO: 3227 - protein, 14 aa, synthetic construct
GYDSPHKSGQNQQT

SEQ ID NO: 3228 - protein, 14 aa, synthetic construct
GHDSPHKSGQNLQT

SEQ ID NO: 3229 - protein, 14 aa, synthetic construct
GHDSPHKSRQDQQT

SEQ ID NO: 3230 - protein, 14 aa, synthetic construct
GDDSPHKSGQKQLT

SEQ ID NO: 3231 - protein, 14 aa, synthetic construct
GDDSPHKSGHNQQT

SEQ ID NO: 3232 - protein, 14 aa, synthetic construct
GHDSPHKSGQMIHT

SEQ ID NO: 3233 - protein, 14 aa, synthetic construct
GHDSPHKSGRNHQS

SEQ ID NO: 3234 - protein, 14 aa, synthetic construct
GHDSPHKSVQNRQT

SEQ ID NO: 3235 - protein, 14 aa, synthetic construct
GHDSPHKSGQKMNT

SEQ ID NO: 3236 - protein, 14 aa, synthetic construct
GHDSPHKSGQSQQN

SEQ ID NO: 3237 - protein, 14 aa, synthetic construct
GHDSPHKSGQYQHA

SEQ ID NO: 3238 - skipped

SEQ ID NO: 3239 - protein, 18 aa, synthetic construct
KTIIGSGSPHSKAQNRHT

SEQ ID NO: 3240 - protein, 18 aa, synthetic construct
KTFPGSGSPHSKVQNQQT

SEQ ID NO: 3241 - protein, 18 aa, synthetic construct
KTEKMSGSPHSKAQNQQT

SEQ ID NO: 3242 - protein, 18 aa, synthetic construct
KTVNGSGSPHSKARDQQT

SEQ ID NO: 3243 - protein, 18 aa, synthetic construct
KTFNGSGSPHSKAPNLQT

SEQ ID NO: 3244 - protein, 18 aa, synthetic construct
KTEKTSGSPHSKAQNQQT

SEQ ID NO: 3245 - protein, 18 aa, synthetic construct
KTINGSGSPHSKAHVRQT

SEQ ID NO: 3246 - protein, 18 aa, synthetic construct
KTVNGSGSPHSKAPNQHT

SEQ ID NO: 3247 - protein, 18 aa, synthetic construct
KTEKISGSPHSKAQNQQT

SEQ ID NO: 3248 - protein, 18 aa, synthetic construct
KTVNGSGSPHSKTQSQQT

SEQ ID NO: 3249 - protein, 18 aa, synthetic construct
TTINGSGSPHSKAQNQQT

SEQ ID NO: 3250 - protein, 18 aa, synthetic construct
KSINESGSPHSKAQNQQI

SEQ ID NO: 3251 - protein, 18 aa, synthetic construct
KTERTSGSPHSKAQNQQT

SEQ ID NO: 3252 - protein, 18 aa, synthetic construct
KTINGSGSPHSKAQPAKT

SEQ ID NO: 3253 - protein, 18 aa, synthetic construct
KTEKSSGSPHSKAQNQQT

SEQ ID NO: 3254 - protein, 18 aa, synthetic construct
KTEKGSGSPHSKAQNQQT

SEQ ID NO: 3255 - protein, 18 aa, synthetic construct
KTINGSGSPHSKSQTQQN

SEQ ID NO: 3256 - protein, 18 aa, synthetic construct
KTERISGSPHSKAQNQQT

SEQ ID NO: 3257 - protein, 18 aa, synthetic construct
KTERASGSPHSKAQNQQT

SEQ ID NO: 3258 - protein, 18 aa, synthetic construct
KELHGSGSPHSKAQNQQT

SEQ ID NO: 3259 - protein, 18 aa, synthetic construct
KAINGSGSPHSKAQNLAT

SEQ ID NO: 3260 - protein, 18 aa, synthetic construct
KTVNGSGSPHSKSQNQLT

SEQ ID NO: 3261 - protein, 18 aa, synthetic construct
KTERNSGSPHSKAQNQQT

SEQ ID NO: 3262 - protein, 18 aa, synthetic construct
KTFNGSGSPHSKAQGQQT

SEQ ID NO: 3263 - protein, 18 aa, synthetic construct
KTERVSGSPHSKAQNQQT

SEQ ID NO: 3264 - protein, 18 aa, synthetic construct
KTINGSGSPHSKALNRQS

SEQ ID NO: 3265 - protein, 18 aa, synthetic construct
KTERLSGSPHSKAQNQQT

SEQ ID NO: 3266 - protein, 18 aa, synthetic construct
KTDNGSGSPHSKAHNQQT

SEQ ID NO: 3267 - protein, 18 aa, synthetic construct
KTFHGSGSPHSKTQNQQT

SEQ ID NO: 3268 - protein, 18 aa, synthetic construct
KTSNGSGSPHSKAQNPPT

SEQ ID NO: 3269 - protein, 18 aa, synthetic construct
ETINGSGSPHSKAQNLQT

SEQ ID NO: 3270 - protein, 18 aa, synthetic construct
NTINGSGSPHSKAQNQQT

SEQ ID NO: 3271 - protein, 18 aa, synthetic construct
KTENMSGSPHSKAQNQQT

SEQ ID NO: 3272 - protein, 18 aa, synthetic construct
KTENVSGSPHSKAQNQQT

SEQ ID NO: 3273 - protein, 18 aa, synthetic construct
KTSSGSGSPHSKAQYQQT

SEQ ID NO: 3274 - protein, 18 aa, synthetic construct
KTEKVSGSPHSKAQNQQT

SEQ ID NO: 3275 - protein, 18 aa, synthetic construct
KAINGSGSPHSKAQDQET

SEQ ID NO: 3276 - protein, 18 aa, synthetic construct
KTCNKSGSPHSKAQNQQT

SEQ ID NO: 3277 - protein, 18 aa, synthetic construct
KTEHLSGSPHSKAQNQQT

SEQ ID NO: 3278 - protein, 18 aa, synthetic construct
KAEMGSGSPHSKAQNQQT

SEQ ID NO: 3279 - protein, 18 aa, synthetic construct
KATNGSGSPHSKAQNHQT

SEQ ID NO: 3280 - protein, 18 aa, synthetic construct
KAIKGSGSPHSKAQDQQT

SEQ ID NO: 3281 - protein, 18 aa, synthetic construct
KTINGSGSPHSKGHWQQT

SEQ ID NO: 3282 - protein, 18 aa, synthetic construct
KTDKTSGSPHSKAQNQQT

SEQ ID NO: 3283 - protein, 18 aa, synthetic construct
KTFKGSGSPHSKAPNQQT

SEQ ID NO: 3284 - protein, 18 aa, synthetic construct
KTVNGSGSPHSKAQNQLI

SEQ ID NO: 3285 - protein, 18 aa, synthetic construct
KTINGSGSPHSKRPEQQT

SEQ ID NO: 3286 - protein, 18 aa, synthetic construct
KTINGSGSPHSKAQRTMT

SEQ ID NO: 3287 - protein, 18 aa, synthetic construct
KTEKASGSPHSKAQNQQT

SEQ ID NO: 3288 - protein, 18 aa, synthetic construct
KSDQGSGSPHSKAQNQQT

SEQ ID NO: 3289 - protein, 18 aa, synthetic construct
KTEITSGSPHSKAQNQQT

SEQ ID NO: 3290 - protein, 18 aa, synthetic construct
KTDKSSGSPHSKAQNQQT

SEQ ID NO: 3291 - protein, 18 aa, synthetic construct
KTIDGSGSPHSKAQNQQH

SEQ ID NO: 3292 - protein, 18 aa, synthetic construct
KNTNGSGSPHSKAQNQQT

SEQ ID NO: 3293 - protein, 18 aa, synthetic construct
KTETHSGSPHSKAQNQQT

SEQ ID NO: 3294 - protein, 18 aa, synthetic construct
KTINGSGSPHSKALHQHT

SEQ ID NO: 3295 - protein, 18 aa, synthetic construct
KTINGSGSPHSKAQHRIT

SEQ ID NO: 3296 - protein, 18 aa, synthetic construct
KTINGSGSPHSKAQYIHT

SEQ ID NO: 3297 - protein, 18 aa, synthetic construct
KTENISGSPHSKAQNQQT

SEQ ID NO: 3298 - protein, 18 aa, synthetic construct
KTINGSGSPHSKAQKFET

SEQ ID NO: 3299 - protein, 18 aa, synthetic construct
KTSNESGSPHSKAQNHQT

SEQ ID NO: 3300 - protein, 18 aa, synthetic construct
KTINGSGSPHSKAQFPST

SEQ ID NO: 3301 - protein, 18 aa, synthetic construct
KTERPSGSPHSKAQNQQT

SEQ ID NO: 3302 - protein, 18 aa, synthetic construct
KTERMSGSPHSKAQNQQT

SEQ ID NO: 3303 - protein, 18 aa, synthetic construct
KTERSSGSPHSKAQNQQT

SEQ ID NO: 3304 - protein, 18 aa, synthetic construct
KTELHSGSPHSKAQNQQT

SEQ ID NO: 3305 - protein, 18 aa, synthetic construct
KTELTSGSPHSKAQNQQT

SEQ ID NO: 3306 - protein, 18 aa, synthetic construct
KTINGSGSPHSKAHNQQR

SEQ ID NO: 3307 - protein, 18 aa, synthetic construct
KTINGSGSPHSKAQAIKT

SEQ ID NO: 3308 - protein, 18 aa, synthetic construct
KTENTSGSPHSKAQNQQT

SEQ ID NO: 3309 - protein, 18 aa, synthetic construct
KTIDGSGSPHSKGQNRQT

SEQ ID NO: 3310 - protein, 18 aa, synthetic construct
KNINGSGSPHSKAQSQQT

SEQ ID NO: 3311 - protein, 18 aa, synthetic construct
KTSNASGSPHSKAQNQLT

SEQ ID NO: 3312 - protein, 18 aa, synthetic construct
KTEARSGSPHSKAQNQQT

SEQ ID NO: 3313 - protein, 18 aa, synthetic construct
KTEKNSGSPHSKAQNQQT

SEQ ID NO: 3314 - protein, 18 aa, synthetic construct
KTANGSGSPHSKAQYQQT

SEQ ID NO: 3315 - protein, 18 aa, synthetic construct
KTVNGSGSPHSKAQYQHT

SEQ ID NO: 3316 - protein, 18 aa, synthetic construct
KTINGSGSPHTKAQNPQS

SEQ ID NO: 3317 - protein, 18 aa, synthetic construct
KTINGSGSPHSKGQNPPT

SEQ ID NO: 3318 - protein, 18 aa, synthetic construct
KTIIGSGSPHSKAQHQLT

SEQ ID NO: 3319 - protein, 18 aa, synthetic construct
KTINGSGSPHSKAQSPPT

SEQ ID NO: 3320 - protein, 18 aa, synthetic construct
NTIYGSGSPHSKAQNQQT

SEQ ID NO: 3321 - protein, 18 aa, synthetic construct
KTINGSGSPHSKAQAKLT

SEQ ID NO: 3322 - protein, 18 aa, synthetic construct
KTDKNSGSPHSKAQNQQT

SEQ ID NO: 3323 - protein, 18 aa, synthetic construct
KTINGSGSPHSKTKSQQT

SEQ ID NO: 3324 - protein, 18 aa, synthetic construct
KTINGSGSPHSKAQDRPT

SEQ ID NO: 3325 - protein, 18 aa, synthetic construct
KTINGSGSPHSKAQSQQL

SEQ ID NO: 3326 - protein, 18 aa, synthetic construct
KTENLSGSPHSKAQNQQT

SEQ ID NO: 3327 - protein, 18 aa, synthetic construct
KTINGSGSPHSKAQAFHT

SEQ ID NO: 3328 - protein, 18 aa, synthetic construct
KTINGSGSPHSKAQKQQD

SEQ ID NO: 3329 - protein, 18 aa, synthetic construct
KTFSGSGSPHSKAQNLQT

SEQ ID NO: 3330 - protein, 18 aa, synthetic construct
KAINGSGSPHSKAQNAQT

SEQ ID NO: 3331 - protein, 18 aa, synthetic construct
KTESWSGSPHSKAQNQQT

SEQ ID NO: 3332 - protein, 18 aa, synthetic construct
KTTNGSGSPHSKAHNQLT

SEQ ID NO: 3333 - protein, 18 aa, synthetic construct
KTEDKSGSPHSKAQNQQT

SEQ ID NO: 3334 - protein, 18 aa, synthetic construct
KTESASGSPHSKAQNQQT

SEQ ID NO: 3335 - protein, 18 aa, synthetic construct
KTNNGSGSPHSKAQNQQY

SEQ ID NO: 3336 - protein, 18 aa, synthetic construct
KTDKMSGSPHSKAQNQQT

SEQ ID NO: 3337 - protein, 18 aa, synthetic construct
KEVHGSGSPHSKAQNQQT

SEQ ID NO: 3338 - protein, 18 aa, synthetic construct
KTINGSGSPHSKAQKLNT

SEQ ID NO: 3339 - protein, 18 aa, synthetic construct
KTTNGSGSPHSKAQYQHT

SEQ ID NO: 3340 - protein, 18 aa, synthetic construct
KTISGSGSPHSKAQYQHT

SEQ ID NO: 3341 - protein, 18 aa, synthetic construct
KTESTSGSPHSKAQNQQT

SEQ ID NO: 3342 - protein, 18 aa, synthetic construct
KTINGSGSPHSKSQNVQT

SEQ ID NO: 3343 - protein, 18 aa, synthetic construct
KSINGSGSPHSKAQAQQT

SEQ ID NO: 3344 - protein, 18 aa, synthetic construct
KTVNGSGSPHSKAQNLQA

SEQ ID NO: 3345 - protein, 18 aa, synthetic construct
KTVRDSGSPHSKAQNQQT

SEQ ID NO: 3346 - protein, 18 aa, synthetic construct
KTFNASGSPHSKAPNQQT

SEQ ID NO: 3347 - protein, 18 aa, synthetic construct
KTDRMSGSPHSKAQNQQT

SEQ ID NO: 3348 - protein, 18 aa, synthetic construct
KTINGSGSPHSKAQTPPT

SEQ ID NO: 3349 - protein, 18 aa, synthetic construct
ETIKGSGSPHSKAQNQQT

SEQ ID NO: 3350 - protein, 18 aa, synthetic construct
KNHIGSGSPHSKAQNQQT

SEQ ID NO: 3351 - protein, 18 aa, synthetic construct
KTINGSGSPHSKAQYQHA

SEQ ID NO: 3352 - protein, 18 aa, synthetic construct
KTINGSGSPHSKAQGQQA

SEQ ID NO: 3353 - protein, 18 aa, synthetic construct
KTFNGSGSPHNKAQNHQT

SEQ ID NO: 3354 - protein, 18 aa, synthetic construct
KESDGSGSPHSKAQNQQT

SEQ ID NO: 3355 - protein, 18 aa, synthetic construct
KTINGSGSPHSKAQPPAT

SEQ ID NO: 3356 - protein, 18 aa, synthetic construct
KTINGSGSPHSKAQERPT

SEQ ID NO: 3357 - protein, 18 aa, synthetic construct
KTIKGSGSPHSKAQDLQT

SEQ ID NO: 3358 - protein, 18 aa, synthetic construct
KTDLKSGSPHSKAQNQQT

SEQ ID NO: 3359 - protein, 18 aa, synthetic construct
KTINGSGSPHSKAQAMHT

SEQ ID NO: 3360 - protein, 18 aa, synthetic construct
KTVPNSGSPHSKAQNQQT

SEQ ID NO: 3361 - protein, 18 aa, synthetic construct
KTVIGSGSPHSKALNQQT

SEQ ID NO: 3362 - protein, 18 aa, synthetic construct
KTINGSGSPHSKAQHPST

SEQ ID NO: 3363 - protein, 18 aa, synthetic construct
KTINGSGSPHSKAPGLQT

SEQ ID NO: 3364 - protein, 18 aa, synthetic construct
KTINGSGSPHSKAQGIRT

SEQ ID NO: 3365 - protein, 18 aa, synthetic construct
KTESHSGSPHSKAQNQQT

SEQ ID NO: 3366 - protein, 18 aa, synthetic construct
KTINGSGSPHSKAQAPAT

SEQ ID NO: 3367 - protein, 18 aa, synthetic construct
KTINGSGSPHSKSQSQQI

SEQ ID NO: 3368 - protein, 18 aa, synthetic construct
KAEHGSGSPHSKAQNQQT

SEQ ID NO: 3369 - protein, 18 aa, synthetic construct
KTEDRSGSPHSKAQNQQT

SEQ ID NO: 3370 - protein, 18 aa, synthetic construct
KNCLGSGSPHSKAQNQQT

SEQ ID NO: 3371 - protein, 18 aa, synthetic construct
KTDRGSGSPHSKAQNQQT

SEQ ID NO: 3372 - protein, 18 aa, synthetic construct
KTINGSGSPHSKAQIPPT

SEQ ID NO: 3373 - protein, 18 aa, synthetic construct
KTVKGSGSPHSKAQDQQT

SEQ ID NO: 3374 - protein, 18 aa, synthetic construct
KNADGSGSPHSKAQNQQT

SEQ ID NO: 3375 - protein, 18 aa, synthetic construct
KTDKVSGSPHSKAQNQQT

SEQ ID NO: 3376 - protein, 18 aa, synthetic construct
KTITGSGSPHSKAQTQLT

SEQ ID NO: 3377 - protein, 18 aa, synthetic construct
KTINGSGSPHSKAQAPST

SEQ ID NO: 3378 - protein, 18 aa, synthetic construct
KNCVGSGSPHSKAQNQQT

SEQ ID NO: 3379 - protein, 18 aa, synthetic construct
KTVKDSGSPHSKAQNQQT

SEQ ID NO: 3380 - protein, 18 aa, synthetic construct
KNALGSGSPHSKAQNQQT

SEQ ID NO: 3381 - protein, 18 aa, synthetic construct
KVINGSGSPHSKGQNQQT

SEQ ID NO: 3382 - protein, 18 aa, synthetic construct
KTSNASGSPHSKAHNQQT

SEQ ID NO: 3383 - protein, 18 aa, synthetic construct
KTINGSGSPHSKAQNTYA

SEQ ID NO: 3384 - protein, 18 aa, synthetic construct
KTINGSGSPHSKSQNQHI

SEQ ID NO: 3385 - protein, 18 aa, synthetic construct
KTEFVSGSPHSKAQNQQT

SEQ ID NO: 3386 - protein, 18 aa, synthetic construct
KTVNGSGSPHSKAQNHLT

SEQ ID NO: 3387 - protein, 18 aa, synthetic construct
KTREISGSPHSKAQNQQT

SEQ ID NO: 3388 - protein, 18 aa, synthetic construct
KTINGSGSPHSKAQIGMT

SEQ ID NO: 3389 - protein, 18 aa, synthetic construct
KTIDGSGSPHSKALNKQT

SEQ ID NO: 3390 - protein, 18 aa, synthetic construct
KQGEGSGSPHSKAQNQQT

SEQ ID NO: 3391 - protein, 18 aa, synthetic construct
KTVNGSGSPHSKAQLQQT

SEQ ID NO: 3392 - protein, 18 aa, synthetic construct
KSINGSGSPHSKTQSQQT

SEQ ID NO: 3393 - protein, 18 aa, synthetic construct
KSEKGSGSPHSKAQNQQT

SEQ ID NO: 3394 - protein, 18 aa, synthetic construct
KNVNGSGSPHSKAQNQQT

SEQ ID NO: 3395 - protein, 18 aa, synthetic construct
KGGEGSGSPHSKAQNQQT

SEQ ID NO: 3396 - protein, 18 aa, synthetic construct
KTINGSGSPHSKAQRMST

SEQ ID NO: 3397 - protein, 18 aa, synthetic construct
KTINGSGSPHSKAQGILT

SEQ ID NO: 3398 - protein, 18 aa, synthetic construct
KEFVGSGSPHSKAQNQQT

SEQ ID NO: 3399 - protein, 18 aa, synthetic construct
KTIIGSGSPHSKAQDRQT

SEQ ID NO: 3400 - protein, 18 aa, synthetic construct
KSDKGSGSPHSKAQNQQT

SEQ ID NO: 3401 - protein, 18 aa, synthetic construct
KTEQVSGSPHSKAQNQQT

SEQ ID NO: 3402 - protein, 18 aa, synthetic construct
KTEHVSGSPHSKAQNQQT

SEQ ID NO: 3403 - protein, 18 aa, synthetic construct
KTINGSGSPHSKARDWQT

SEQ ID NO: 3404 - protein, 18 aa, synthetic construct
KTENASGSPHSKAQNQQT

SEQ ID NO: 3405 - protein, 18 aa, synthetic construct
KEVQGSGSPHSKAQNQQT

SEQ ID NO: 3406 - protein, 18 aa, synthetic construct
KTINGSGSPHSKAQNTHD

SEQ ID NO: 3407 - protein, 18 aa, synthetic construct
KTINGSGSPHSKAPNLQI

SEQ ID NO: 3408 - protein, 18 aa, synthetic construct
KTINGSGSPHSKAQERST

SEQ ID NO: 3409 - protein, 18 aa, synthetic construct
KTSNGSGSPHSKAQNYQT

SEQ ID NO: 3410 - protein, 18 aa, synthetic construct
KTEYISGSPHSKAQNQQT

SEQ ID NO: 3411 - protein, 18 aa, synthetic construct
KTINGSGSPHSKAQRTCT

SEQ ID NO: 3412 - protein, 18 aa, synthetic construct
KTINGSGSPHSKAQIGHT

SEQ ID NO: 3413 - protein, 18 aa, synthetic construct
KNCWGSGSPHSKAQNQQT

SEQ ID NO: 3414 - protein, 18 aa, synthetic construct
KTINGSGSPHSKAQGAIT

SEQ ID NO: 3415 - protein, 18 aa, synthetic construct
KTDVNSGSPHSKAQNQQT

SEQ ID NO: 3416 - protein, 18 aa, synthetic construct
KSDIGSGSPHSKAQNQQT

SEQ ID NO: 3417 - protein, 18 aa, synthetic construct
KTINGSGSPHSKAQVPPT

SEQ ID NO: 3418 - protein, 18 aa, synthetic construct
KTINGSGSPHSKAQVQQI

SEQ ID NO: 3419 - protein, 18 aa, synthetic construct
KTINGSGSPHSKALMRQT

SEQ ID NO: 3420 - protein, 18 aa, synthetic construct
KTINGSGSPHSKAQYSVT

SEQ ID NO: 3421 - protein, 18 aa, synthetic construct
KNSIGSGSPHSKAQNQQT

SEQ ID NO: 3422 - protein, 18 aa, synthetic construct
KTINGSGSPHSKVPNLQT

SEQ ID NO: 3423 - protein, 18 aa, synthetic construct
KAINGSGSPHSKAQSQQI

SEQ ID NO: 3424 - protein, 18 aa, synthetic construct
KTINGSGSPHSKAQAITT

SEQ ID NO: 3425 - protein, 18 aa, synthetic construct
KTINGSGSPHSKAQKTLT

SEQ ID NO: 3426 - protein, 18 aa, synthetic construct
KTVNGSGSPHSKAQNQWT

SEQ ID NO: 3427 - protein, 18 aa, synthetic construct
KTINGSGSPHSKAQLHHT

SEQ ID NO: 3428 - protein, 18 aa, synthetic construct
KTEQTSGSPHSKAQNQQT

SEQ ID NO: 3429 - protein, 18 aa, synthetic construct
KTINGSGSPHSKAQNIII

SEQ ID NO: 3430 - protein, 18 aa, synthetic construct
KNSLGSGSPHSKAQNQQT

SEQ ID NO: 3431 - protein, 18 aa, synthetic construct
KTINGSGSPHSKAQGHHT

SEQ ID NO: 3432 - protein, 18 aa, synthetic construct
KTDRTSGSPHSKAQNQQT

SEQ ID NO: 3433 - protein, 18 aa, synthetic construct
KTINGSGSPHSKAQSKVT

SEQ ID NO: 3434 - protein, 18 aa, synthetic construct
KEVVGSGSPHSKAQNQQT

SEQ ID NO: 3435 - protein, 18 aa, synthetic construct
KTINGSGSPHSKAQLPST

SEQ ID NO: 3436 - protein, 18 aa, synthetic construct
KTINGSGSPHSKAIGKQT

SEQ ID NO: 3437 - protein, 18 aa, synthetic construct
KTEPTSGSPHSKAQNQQT

SEQ ID NO: 3438 - protein, 18 aa, synthetic construct
KTINGSGSPHSKAQAIHT

SEQ ID NO: 3439 - protein, 18 aa, synthetic construct
KTINGSGSPHSKAQHGLT

SEQ ID NO: 3440 - protein, 18 aa, synthetic construct
KSELGSGSPHSKAQNQQT

SEQ ID NO: 3441 - protein, 18 aa, synthetic construct
KTINGSGSPHSKAQFMCT

SEQ ID NO: 3442 - protein, 18 aa, synthetic construct
KTINVSGSPHSKAQGQQT

SEQ ID NO: 3443 - protein, 18 aa, synthetic construct
KTVNGSGSPHSKAQHLQT

SEQ ID NO: 3444 - protein, 18 aa, synthetic construct
KTINGSGSPHSKTQNHQN

SEQ ID NO: 3445 - protein, 18 aa, synthetic construct
KTINGSGSPHSKAQPART

SEQ ID NO: 3446 - protein, 18 aa, synthetic construct
KTVNGSGSPHSKAQSLQT

SEQ ID NO: 3447 - protein, 18 aa, synthetic construct
KTINGSGSPHSKSQSQLT

SEQ ID NO: 3448 - protein, 18 aa, synthetic construct
KTWQNSGSPHSKAQNQQT

SEQ ID NO: 3449 - protein, 18 aa, synthetic construct
KTINGSGSPHSKAQDRQS

SEQ ID NO: 3450 - protein, 18 aa, synthetic construct
KTINGSGSPHSKAQMPST

SEQ ID NO: 3451 - protein, 18 aa, synthetic construct
KTINGSGSPHSKAQGSLT

SEQ ID NO: 3452 - protein, 18 aa, synthetic construct
KTEVTSGSPHSKAQNQQT

SEQ ID NO: 3453 - protein, 18 aa, synthetic construct
KTVIGSGSPHSKSQNQQT

SEQ ID NO: 3454 - protein, 18 aa, synthetic construct
KAVNVSGSPHSKAQNQQT

SEQ ID NO: 3455 - protein, 18 aa, synthetic construct
KTDRNSGSPHSKAQNQQT

SEQ ID NO: 3456 - protein, 18 aa, synthetic construct
KTINGSGSPHSKAQVPAT

SEQ ID NO: 3457 - protein, 18 aa, synthetic construct
KGVLGSGSPHSKAQNQQT

SEQ ID NO: 3458 - protein, 18 aa, synthetic construct
KAINGSGSPHSKAQDKQT

SEQ ID NO: 3459 - protein, 18 aa, synthetic construct
KTSNGSGSPHSKAHYQQT

SEQ ID NO: 3460 - protein, 18 aa, synthetic construct
KTINGSGSPHSKAQVPST

SEQ ID NO: 3461 - protein, 18 aa, synthetic construct
KTELRSGSPHSKAQNQQT

SEQ ID NO: 3462 - protein, 18 aa, synthetic construct
KNINGSGSPHSKAQNHQT

SEQ ID NO: 3463 - protein, 18 aa, synthetic construct
KTINGSGSPHSKARGEQT

SEQ ID NO: 3464 - protein, 18 aa, synthetic construct
KTEDLSGSPHSKAQNQQT

SEQ ID NO: 3465 - protein, 18 aa, synthetic construct
KTINGSGSPHSKAPGQQT

SEQ ID NO: 3466 - protein, 18 aa, synthetic construct
KTINGSGSPHSKAQSLQI

SEQ ID NO: 3467 - protein, 18 aa, synthetic construct
KTINGSGSPHSKRLEQQT

SEQ ID NO: 3468 - protein, 18 aa, synthetic construct
KTERGSGSPHSKAQNQQT

SEQ ID NO: 3469 - protein, 18 aa, synthetic construct
KTVNGSGSPHSKAPNQQT

SEQ ID NO: 3470 - protein, 18 aa, synthetic construct
KTSNGSGSPHSKAQNQST

SEQ ID NO: 3471 - protein, 18 aa, synthetic construct
KTINGSGSPHSKAQKVIT

SEQ ID NO: 3472 - protein, 18 aa, synthetic construct
KTEGISGSPHSKAQNQQT

SEQ ID NO: 3473 - protein, 18 aa, synthetic construct
KTINGSGSPHSKAQNNDQ

SEQ ID NO: 3474 - protein, 18 aa, synthetic construct
KTINGSGSPHSKAQSVHT

SEQ ID NO: 3475 - protein, 18 aa, synthetic construct
KTINGSGSPHSKAQPLGT

SEQ ID NO: 3476 - protein, 18 aa, synthetic construct
KTCNASGSPHSKAQNQQT

SEQ ID NO: 3477 - protein, 18 aa, synthetic construct
KAINGSGSPHSKAHNQET

SEQ ID NO: 3478 - protein, 18 aa, synthetic construct
KTEGLSGSPHSKAQNQQT

SEQ ID NO: 3479 - protein, 18 aa, synthetic construct
KTRDASGSPHSKAQNQQT

SEQ ID NO: 3480 - protein, 18 aa, synthetic construct
KTSNGSGSPHSKAQNLQI

SEQ ID NO: 3481 - protein, 18 aa, synthetic construct
KTGNGSGSPHSKAQIQQT

SEQ ID NO: 3482 - protein, 18 aa, synthetic construct
KTDRSSGSPHSKAQNQQT

SEQ ID NO: 3483 - protein, 18 aa, synthetic construct
KTINGSGSPHSKAQVRNT

SEQ ID NO: 3484 - protein, 18 aa, synthetic construct
KTINGSGSPHSKAPSNQT

SEQ ID NO: 3485 - protein, 18 aa, synthetic construct
KTINGSGSPHSKAQVGHT

SEQ ID NO: 3486 - protein, 18 aa, synthetic construct
KNAIGSGSPHSKAQNQQT

SEQ ID NO: 3487 - protein, 18 aa, synthetic construct
KAENGSGSPHSKAQNQQT

SEQ ID NO: 3488 - protein, 18 aa, synthetic construct
KTINGSGSPHSKAQRDIT

SEQ ID NO: 3489 - protein, 18 aa, synthetic construct
KTINGSGSPHSKAQMPNT

SEQ ID NO: 3490 - protein, 18 aa, synthetic construct
KTVNGSGSPHSKSQNQQT

SEQ ID NO: 3491 - protein, 18 aa, synthetic construct
KTINGSGSPHSKARGLQT

SEQ ID NO: 3492 - protein, 18 aa, synthetic construct
KTELGSGSPHSKAQNQQT

SEQ ID NO: 3493 - protein, 18 aa, synthetic construct
KAETGSGSPHSKAQNQQT

SEQ ID NO: 3494 - protein, 18 aa, synthetic construct
KTINGSGSPHSKLQKQQT

SEQ ID NO: 3495 - protein, 18 aa, synthetic construct
KTINGSGSPHSKAPSLQT

SEQ ID NO: 3496 - protein, 18 aa, synthetic construct
KTINGSGSPHSKAQRDQT

SEQ ID NO: 3497 - protein, 18 aa, synthetic construct
KTDVGSGSPHSKAQNQQT

SEQ ID NO: 3498 - protein, 18 aa, synthetic construct
KTINGSGSPHSKNRDQQT

SEQ ID NO: 3499 - protein, 18 aa, synthetic construct
KSINGSGSPHSKAPNLQT

SEQ ID NO: 3500 - protein, 18 aa, synthetic construct
KTINGSGSPHSKAQAKGT

SEQ ID NO: 3501 - protein, 18 aa, synthetic construct
KTVNGSGSPHSKAQDKQT

SEQ ID NO: 3502 - protein, 18 aa, synthetic construct
KTINGSGSPHSKAQSAHT

SEQ ID NO: 3503 - protein, 18 aa, synthetic construct
KTVPTSGSPHSKAQNQQT

SEQ ID NO: 3504 - protein, 18 aa, synthetic construct
KTIDGSGSPHSKSQNHQT

SEQ ID NO: 3505 - protein, 18 aa, synthetic construct
KTDVKSGSPHSKAQNQQT

SEQ ID NO: 3506 - protein, 18 aa, synthetic construct
KAINRSGSPHSKAQDQQT

SEQ ID NO: 3507 - protein, 18 aa, synthetic construct
KTINGSGSPHSKAQSTMT

SEQ ID NO: 3508 - protein, 18 aa, synthetic construct
KTVNASGSPHSKAQNQLT

SEQ ID NO: 3509 - protein, 18 aa, synthetic construct
KTINGSGSPHSKAQREMT

SEQ ID NO: 3510 - protein, 18 aa, synthetic construct
KTVHGSGSPHSKAQSQQT

SEQ ID NO: 3511 - protein, 18 aa, synthetic construct
KTINGSGSPHSKAQYRAT

SEQ ID NO: 3512 - protein, 18 aa, synthetic construct
KTEPMSGSPHSKAQNQQT

SEQ ID NO: 3513 - protein, 18 aa, synthetic construct
KTINGSGSPHSKNQWQQT

SEQ ID NO: 3514 - protein, 18 aa, synthetic construct
KETAGSGSPHSKAQNQQT

SEQ ID NO: 3515 - protein, 18 aa, synthetic construct
KTINGSGSPHSKAQRMNT

SEQ ID NO: 3516 - protein, 18 aa, synthetic construct
KNNLGSGSPHSKAQNQQT

SEQ ID NO: 3517 - protein, 18 aa, synthetic construct
KTINGSGSPHAKAQNHQT

SEQ ID NO: 3518 - protein, 18 aa, synthetic construct
KTINGSGSPHSKAGDSQT

SEQ ID NO: 3519 - protein, 18 aa, synthetic construct
KTINGSGSPHSKLKSQQT

SEQ ID NO: 3520 - protein, 18 aa, synthetic construct
KTINGSGSPHSKAQKIST

SEQ ID NO: 3521 - protein, 18 aa, synthetic construct
KTEYNSGSPHSKAQNQQT

SEQ ID NO: 3522 - protein, 18 aa, synthetic construct
KTINGSGSPHSKAPSMQT

SEQ ID NO: 3523 - protein, 18 aa, synthetic construct
EAINGSGSPHSKAQNQQT

SEQ ID NO: 3524 - protein, 18 aa, synthetic construct
KTINGSGSPHSKASPRQT

SEQ ID NO: 3525 - protein, 18 aa, synthetic construct
KTINGSGSPHSKRMEQQT

SEQ ID NO: 3526 - protein, 18 aa, synthetic construct
KTINGSGSPHSKAQYQNT

SEQ ID NO: 3527 - protein, 18 aa, synthetic construct
KEINGRGSPHSKAQNQQT

SEQ ID NO: 3528 - protein, 18 aa, synthetic construct
KTVNRNGSPHSKAQNQQT

SEQ ID NO: 3529 - protein, 18 aa, synthetic construct
KTINGPGSPHSKAHNQQT

SEQ ID NO: 3530 - protein, 18 aa, synthetic construct
KTSYGNGSPHSKAQNQQT

SEQ ID NO: 3531 - protein, 18 aa, synthetic construct
KSVNGNGSPHSKAQNQQT

SEQ ID NO: 3532 - protein, 18 aa, synthetic construct
KTINGSGSPHGWVQNQQT

SEQ ID NO: 3533 - protein, 18 aa, synthetic construct
KTINGGGSPHSKAQTQQI

SEQ ID NO: 3534 - protein, 18 aa, synthetic construct
KTVHGNGSPHSKAQNQQT

SEQ ID NO: 3535 - protein, 18 aa, synthetic construct
KTINGGGSPHSKAQNQQC

SEQ ID NO: 3536 - protein, 18 aa, synthetic construct
KTIDGGGSPHSKAQNKQT

SEQ ID NO: 3537 - protein, 18 aa, synthetic construct
KTINGGGSPHSKAQNQLI

SEQ ID NO: 3538 - protein, 18 aa, synthetic construct
KNINGGGSPHSKAQNQQT

SEQ ID NO: 3539 - protein, 18 aa, synthetic construct
KTINGGGSPHSKSQNQLT

SEQ ID NO: 3540 - protein, 18 aa, synthetic construct
KTVNGNGSPHSKAQNKQT

SEQ ID NO: 3541 - protein, 18 aa, synthetic construct
KTVNGNGSPHSKAQNQHT

SEQ ID NO: 3542 - protein, 18 aa, synthetic construct
KTINGGGSPHSKALNQQN

SEQ ID NO: 3543 - protein, 18 aa, synthetic construct
KTINGTGSPHSKAQNHQI

SEQ ID NO: 3544 - protein, 18 aa, synthetic construct
KTIIGGGSPHSKAHNQQT

SEQ ID NO: 3545 - protein, 18 aa, synthetic construct
KTINGNGSPHSKAQNPLT

SEQ ID NO: 3546 - protein, 18 aa, synthetic construct
KSIKGNGSPHSKAQNQQT

SEQ ID NO: 3547 - protein, 18 aa, synthetic construct
KTINGGGSPHSKAQSQQI

SEQ ID NO: 3548 - protein, 18 aa, synthetic construct
KTINGSVSPHGKAQNQLT

SEQ ID NO: 3549 - protein, 18 aa, synthetic construct
KTINGIGSPHSKAQNLGT

SEQ ID NO: 3550 - protein, 18 aa, synthetic construct
KTVNGNGSPHSKAQNHQT

SEQ ID NO: 3551 - protein, 18 aa, synthetic construct
KTSNGGGSPHSKAQNLQT

SEQ ID NO: 3552 - protein, 18 aa, synthetic construct
KTINGGGSPHSKSQNQHT

SEQ ID NO: 3553 - protein, 18 aa, synthetic construct
KTVNGGGSPHSKAQSQQT

SEQ ID NO: 3554 - protein, 18 aa, synthetic construct
KTIPIDGSPHSKAQNQQT

SEQ ID NO: 3555 - protein, 18 aa, synthetic construct
KTINGGGSPHSKAQNPPT

SEQ ID NO: 3556 - protein, 18 aa, synthetic construct
KTINGLGSPHSKSQNQQT

SEQ ID NO: 3557 - protein, 18 aa, synthetic construct
KTINGTGSPHSKAQNQQM

SEQ ID NO: 3558 - protein, 18 aa, synthetic construct
KTIRDAGSPHSKAQNQQT

SEQ ID NO: 3559 - protein, 18 aa, synthetic construct
KTVNGGGSPHSKAQNQQS

SEQ ID NO: 3560 - protein, 18 aa, synthetic construct
KTIQDGGSPHSKAQNQQT

SEQ ID NO: 3561 - protein, 18 aa, synthetic construct
KTISGGGSPHSKAQNQQN

SEQ ID NO: 3562 - protein, 18 aa, synthetic construct
KTINGGGSPHSKAQDKQT

SEQ ID NO: 3563 - protein, 18 aa, synthetic construct
KTIIGGGSPHSKAQNPQT

SEQ ID NO: 3564 - protein, 18 aa, synthetic construct
KTINGTGSPHSKAPNQLT

SEQ ID NO: 3565 - protein, 18 aa, synthetic construct
KTFNGGGSPHSKAQYQQT

SEQ ID NO: 3566 - protein, 18 aa, synthetic construct
KTVNGGGSPHSKAQHQQT

SEQ ID NO: 3567 - protein, 18 aa, synthetic construct
KTIPMEGSPHSKAQNQQT

SEQ ID NO: 3568 - protein, 18 aa, synthetic construct
KTVNGGGSPHSKSQNQQT

SEQ ID NO: 3569 - protein, 18 aa, synthetic construct
KTINGGGSPHSKAQNQMT

SEQ ID NO: 3570 - protein, 18 aa, synthetic construct
KTIRENGSPHSKAQNQQT

SEQ ID NO: 3571 - protein, 18 aa, synthetic construct
KTINGSASPHSKAHSQQT

SEQ ID NO: 3572 - protein, 18 aa, synthetic construct
KTNNGGGSPHSKAQNLQT

SEQ ID NO: 3573 - protein, 18 aa, synthetic construct
KSINGGGSPHSKAQYQQT

SEQ ID NO: 3574 - protein, 18 aa, synthetic construct
KTVNGNGSPHSKSQNQQT

SEQ ID NO: 3575 - protein, 18 aa, synthetic construct
KTLNGNGSPHSKAQNLQT

SEQ ID NO: 3576 - protein, 18 aa, synthetic construct
KTINGSGSSHSKAQNQQT

SEQ ID NO: 3577 - protein, 18 aa, synthetic construct
KTVNGGGSPHSKAQNHQT

SEQ ID NO: 3578 - protein, 18 aa, synthetic construct
KTINGGGSPHSKAQYQHT

SEQ ID NO: 3579 - protein, 18 aa, synthetic construct
KTIPKNGSPHSKAQNQQT

SEQ ID NO: 3580 - protein, 18 aa, synthetic construct
KTINKEGSPHSKAQNQQT

SEQ ID NO: 3581 - protein, 18 aa, synthetic construct
KTVNGGGSPHSKAQNLQT

SEQ ID NO: 3582 - protein, 18 aa, synthetic construct
KTIPAIGSPHSKAQNQQT

SEQ ID NO: 3583 - protein, 18 aa, synthetic construct
KTINGGGSPHSKAQNPQA

SEQ ID NO: 3584 - protein, 18 aa, synthetic construct
KTINGNGSPHSKSQNQHT

SEQ ID NO: 3585 - protein, 18 aa, synthetic construct
KTINGGGSPHSKSQNRQT

SEQ ID NO: 3586 - protein, 18 aa, synthetic construct
KTINGGGSPHSKAQRQQT

SEQ ID NO: 3587 - protein, 18 aa, synthetic construct
KTIIKNGSPHSKAQNQQT

SEQ ID NO: 3588 - protein, 18 aa, synthetic construct
KTINGSGSPHSYHVNQQT

SEQ ID NO: 3589 - protein, 18 aa, synthetic construct
KTERVSGSPHSKAQNQQT

SEQ ID NO: 3590 - skipped

SEQ ID NO: 3591 - protein, 18 aa, synthetic construct
KTFNRSGSPHSKAQNQQI

SEQ ID NO: 3592 - protein, 18 aa, synthetic construct
KTINGSGSPHTKAQNPPT

SEQ ID NO: 3593 - protein, 18 aa, synthetic construct
KSLNGSGSPHTKAQNQQT

SEQ ID NO: 3594 - protein, 18 aa, synthetic construct
KTENKSGSPHSKAQNQQT

SEQ ID NO: 3595 - protein, 18 aa, synthetic construct
KTDKGSGSPHSKAQNQQT

SEQ ID NO: 3596 - protein, 18 aa, synthetic construct
KTSNASGSPHSKAQHQQT

SEQ ID NO: 3597 - protein, 18 aa, synthetic construct
KTINASGSPHSKAINQQT

SEQ ID NO: 3598 - protein, 18 aa, synthetic construct
KTINGSGSPHSKAPNQQH

SEQ ID NO: 3599 - protein, 18 aa, synthetic construct
KTVNASGSPHSKAQNHQT

SEQ ID NO: 3600 - protein, 18 aa, synthetic construct
KTIDGSGSPHSKAENRQT

SEQ ID NO: 3601 - protein, 18 aa, synthetic construct
KTIKGSGSPHSKVQDQQT

SEQ ID NO: 3602 - protein, 18 aa, synthetic construct
KAINGSGSPHSKAQTQQA

SEQ ID NO: 3603 - protein, 18 aa, synthetic construct
KTEAKSGSPHSKAQNQQT

SEQ ID NO: 3604 - protein, 18 aa, synthetic construct
KTIPGSGSPHSKAQNLQT

SEQ ID NO: 3605 - protein, 18 aa, synthetic construct
KTIHGSGSPHSKAQNQAT

SEQ ID NO: 3606 - protein, 18 aa, synthetic construct
KAINGHDSPHKSGQIRQT

SEQ ID NO: 3607 - protein, 18 aa, synthetic construct
KTINGHDSPHKIGQNQHA

SEQ ID NO: 3608 - protein, 18 aa, synthetic construct
KAINGYDSPHKSGQKQQT

SEQ ID NO: 3609 - protein, 18 aa, synthetic construct
KTESGHDSPHKSGQNQQT

SEQ ID NO: 3610 - protein, 18 aa, synthetic construct
KTINGHDSPHKSGQSVQT

SEQ ID NO: 3611 - protein, 18 aa, synthetic construct
TTINGHDSPHKSGQNQQT

SEQ ID NO: 3612 - protein, 18 aa, synthetic construct
KTINGHESPHKSGRSQQT

SEQ ID NO: 3613 - protein, 18 aa, synthetic construct
KTINGHDSPHKSGQNKLE

SEQ ID NO: 3614 - protein, 18 aa, synthetic construct
KTINGHDSPHKTGQNQQK

SEQ ID NO: 3615 - protein, 18 aa, synthetic construct
KAINGHDNPHKSGQNQQT

SEQ ID NO: 3616 - protein, 18 aa, synthetic construct
KTINGQDSPHKSGQHQQA

SEQ ID NO: 3617 - protein, 18 aa, synthetic construct
KSINGHDSPHKSGQIQHT

SEQ ID NO: 3618 - protein, 18 aa, synthetic construct
KAINGHDSPHKSGPRQQT

SEQ ID NO: 3619 - protein, 18 aa, synthetic construct
KTVNGHDSPHKSGHTQQT

SEQ ID NO: 3620 - protein, 18 aa, synthetic construct
KSINGHDSPHKSGQRQHT

SEQ ID NO: 3621 - protein, 18 aa, synthetic construct
KAINGHDSPHKSAQSQQT

SEQ ID NO: 3622 - protein, 18 aa, synthetic construct
KSIYGHESPHKSGQNQQS

SEQ ID NO: 3623 - protein, 18 aa, synthetic construct
KTVNGHDSPHKSLQNQQT

SEQ ID NO: 3624 - protein, 18 aa, synthetic construct
KTSNGYDSPHKSGQKQQT

SEQ ID NO: 3625 - protein, 18 aa, synthetic construct
KTVNGHDSPHKSGRNQET

SEQ ID NO: 3626 - protein, 18 aa, synthetic construct
KTTNGHDSPHKSGQTQLT

SEQ ID NO: 3627 - protein, 18 aa, synthetic construct
KAINGHDSPHKSEKNQQT

SEQ ID NO: 3628 - protein, 18 aa, synthetic construct
KIINGRDSPHKSGQDQQT

SEQ ID NO: 3629 - protein, 18 aa, synthetic construct
KTISGHDSPHKTGHNQQT

SEQ ID NO: 3630 - protein, 18 aa, synthetic construct
KTVNAHDSPHKSGQNQLT

SEQ ID NO: 3631 - protein, 18 aa, synthetic construct
KSINGYDSPHKSGQTQQT

SEQ ID NO: 3632 - protein, 18 aa, synthetic construct
KTINGHESPHKSGQTQQI

SEQ ID NO: 3633 - protein, 18 aa, synthetic construct
KTINGHDSPHKSGQSKQA

SEQ ID NO: 3634 - protein, 18 aa, synthetic construct
KAIIGHESPHKSGQNQQT

SEQ ID NO: 3635 - protein, 18 aa, synthetic construct
KTINGHDSPHKTGQNQPP

SEQ ID NO: 3636 - protein, 18 aa, synthetic construct
KAINGHDSPHKSGQSPQT

SEQ ID NO: 3637 - protein, 18 aa, synthetic construct
KTIKGNDSPHKSVQNQQT

SEQ ID NO: 3638 - protein, 18 aa, synthetic construct
KTEFGHDSPHKSGQNQQT

SEQ ID NO: 3639 - protein, 18 aa, synthetic construct
KTINGHDSPHKSAQNYQT

SEQ ID NO: 3640 - protein, 18 aa, synthetic construct
KTINAHDSPHKIGQNHQT

SEQ ID NO: 3641 - protein, 18 aa, synthetic construct
KTINGHESPHKSAQNRQT

SEQ ID NO: 3642 - protein, 18 aa, synthetic construct
KTTNGHDSPHKSGQNQQG

SEQ ID NO: 3643 - protein, 18 aa, synthetic construct
KTIKGQDSPHKIGQNQQT

SEQ ID NO: 3644 - protein, 18 aa, synthetic construct
KTVNGHDSPHKSGQNHLT

SEQ ID NO: 3645 - protein, 18 aa, synthetic construct
KSINGHDSPHKSGQYQHT

SEQ ID NO: 3646 - protein, 18 aa, synthetic construct
KTINGNDSPHKSVQNHQT

SEQ ID NO: 3647 - protein, 18 aa, synthetic construct
KTITGHDSPHKSGQNQWT

SEQ ID NO: 3648 - protein, 18 aa, synthetic construct
KTNNGHDSPHKSVQNQHT

SEQ ID NO: 3649 - protein, 18 aa, synthetic construct
KTIDGHDSPHKSGQNQHA

SEQ ID NO: 3650 - protein, 18 aa, synthetic construct
KTVNGHDSPHKSGQTRQT

SEQ ID NO: 3651 - protein, 18 aa, synthetic construct
KTVNGHDSPHKSGQNLHT

SEQ ID NO: 3652 - protein, 18 aa, synthetic construct
KAISGHDSPHKSGLNQQT

SEQ ID NO: 3653 - protein, 18 aa, synthetic construct
KAINGHDSPHKSAQNQET

SEQ ID NO: 3654 - protein, 18 aa, synthetic construct
KTITGHDSPHKSGQHLQT

SEQ ID NO: 3655 - protein, 18 aa, synthetic construct
KTINGHDSPHKSRLNQPT

SEQ ID NO: 3656 - protein, 18 aa, synthetic construct
KTVDGHDSPHKSGQKQQT

SEQ ID NO: 3657 - protein, 18 aa, synthetic construct
KTINGQDSPHKSGQNQDT

SEQ ID NO: 3658 - protein, 18 aa, synthetic construct
KTIEGHDSPHKSGRNQQT

SEQ ID NO: 3659 - protein, 18 aa, synthetic construct
KTTNGHDSPHKSGQNLLT

SEQ ID NO: 3660 - protein, 18 aa, synthetic construct
KTINGHDSPHKSGQLVIT

SEQ ID NO: 3661 - protein, 18 aa, synthetic construct
KTVNGHDSPHKSRQSQQT

SEQ ID NO: 3662 - protein, 18 aa, synthetic construct
KTINGHDSPHKSGRTQET

SEQ ID NO: 3663 - protein, 18 aa, synthetic construct
KTINGHDSPHKSVQTHQT

SEQ ID NO: 3664 - protein, 18 aa, synthetic construct
KTSNGHDSPHKSGQNQPA

SEQ ID NO: 3665 - protein, 18 aa, synthetic construct
KTEGKHDSPHKSGQNQQT

SEQ ID NO: 3666 - protein, 18 aa, synthetic construct
KVINGHDSPHKSGQTQQT

SEQ ID NO: 3667 - protein, 18 aa, synthetic construct
KTINGPDSPHKIGQNQQS

SEQ ID NO: 3668 - protein, 18 aa, synthetic construct
KAVNGHDSPHKSVQNQQT

SEQ ID NO: 3669 - protein, 18 aa, synthetic construct
KTINGHDSPHKSRQDQHT

SEQ ID NO: 3670 - protein, 18 aa, synthetic construct
KAINGPDSPHKSGQKQQT

SEQ ID NO: 3671 - protein, 18 aa, synthetic construct
KTINGHDSPHKSRQSQHT

SEQ ID NO: 3672 - protein, 18 aa, synthetic construct
KTIYGHDSPHKSVQNQLT

SEQ ID NO: 3673 - protein, 18 aa, synthetic construct
KTVNGHDSPHKSGQNLLT

SEQ ID NO: 3674 - protein, 18 aa, synthetic construct
KTESAHDSPHKSGQNQQT

SEQ ID NO: 3675 - protein, 18 aa, synthetic construct
KTTNGQDSPHKSGQNQQS

SEQ ID NO: 3676 - protein, 18 aa, synthetic construct
KTIDGHDSPHKSGRNQQI

SEQ ID NO: 3677 - protein, 18 aa, synthetic construct
KTINGYDSPHKSGQYQHT

SEQ ID NO: 3678 - protein, 18 aa, synthetic construct
KTDNGHDSPHKSRQNQQT

SEQ ID NO: 3679 - protein, 18 aa, synthetic construct
KTINGHDSPHKSWVRQQT

SEQ ID NO: 3680 - protein, 18 aa, synthetic construct
KTINGHESPHKSGQNQHS

SEQ ID NO: 3681 - protein, 18 aa, synthetic construct
KTVNGHDSPHKIGHNQQT

SEQ ID NO: 3682 - protein, 18 aa, synthetic construct
KTCNGHDSPHKSGRNQQT

SEQ ID NO: 3683 - protein, 18 aa, synthetic construct
KNVVGHDSPHKSGQNQQT

SEQ ID NO: 3684 - protein, 18 aa, synthetic construct
KTELWHDSPHKSGQNQQT

SEQ ID NO: 3685 - protein, 18 aa, synthetic construct
KTELRHDSPHKSGQNQQT

SEQ ID NO: 3686 - protein, 18 aa, synthetic construct
KTINGHDSPHKSNAWQQT

SEQ ID NO: 3687 - protein, 18 aa, synthetic construct
KTDAGHDSPHKSGQNQQT

SEQ ID NO: 3688 - protein, 18 aa, synthetic construct
KTEVGHDSPHKSGQNQQT

SEQ ID NO: 3689 - protein, 18 aa, synthetic construct
KTESRHDSPHKSGQNQQT

SEQ ID NO: 3690 - protein, 18 aa, synthetic construct
KSELGHDSPHKSGQNQQT

SEQ ID NO: 3691 - protein, 18 aa, synthetic construct
KTINGHDSPHKSGQSVPT

SEQ ID NO: 3692 - protein, 18 aa, synthetic construct
KTINGHESPHKSGQNIQP

SEQ ID NO: 3693 - protein, 18 aa, synthetic construct
KTEMKHDSPHKSGQNQQT

SEQ ID NO: 3694 - protein, 18 aa, synthetic construct
KTINGHDSPHKSVQNHLN

SEQ ID NO: 3695 - protein, 18 aa, synthetic construct
KTINGHDSPHKIGLDQQT

SEQ ID NO: 3696 - protein, 18 aa, synthetic construct
KTINGHDSPHKRGPDQQS

SEQ ID NO: 3697 - protein, 18 aa, synthetic construct
KTIKGHDSPHKSGESQQT

SEQ ID NO: 3698 - protein, 18 aa, synthetic construct
KTEGWHDSPHKSGQNQQT

SEQ ID NO: 3699 - protein, 18 aa, synthetic construct
KTINGHDSPHKHGQNHQT

SEQ ID NO: 3700 - protein, 18 aa, synthetic construct
KTEQLHDSPHKSGQNQQT

SEQ ID NO: 3701 - protein, 18 aa, synthetic construct
KTIIGHDSPHKSGQYQHT

SEQ ID NO: 3702 - protein, 18 aa, synthetic construct
KTSNGHDSPHKSVQNKQT

SEQ ID NO: 3703 - protein, 18 aa, synthetic construct
KIVNGQVSPHKSGQNQQT

SEQ ID NO: 3704 - protein, 18 aa, synthetic construct
KTVNGHDSPHKSGQRQLT

SEQ ID NO: 3705 - protein, 18 aa, synthetic construct
KTVNGHDSPHKIGQNQLT

SEQ ID NO: 3706 - protein, 18 aa, synthetic construct
KTINGHDSPHKSGQIIVT

SEQ ID NO: 3707 - protein, 18 aa, synthetic construct
KTEKIHDSPHKSGQNQQT

SEQ ID NO: 3708 - protein, 18 aa, synthetic construct
KTENAHDSPHKSGQNQQT

SEQ ID NO: 3709 - protein, 18 aa, synthetic construct
KIGNGHESPHKSGQNQQT

SEQ ID NO: 3710 - protein, 18 aa, synthetic construct
KEVMGHDSPHKSGQNQQT

SEQ ID NO: 3711 - protein, 18 aa, synthetic construct
KTEVKHDSPHKSGQNQQT

SEQ ID NO: 3712 - protein, 18 aa, synthetic construct
KTINGYDSPHKSGQKQST

SEQ ID NO: 3713 - protein, 18 aa, synthetic construct
KYQVGHDSPHKSGQNQQT

SEQ ID NO: 3714 - protein, 18 aa, synthetic construct
KTEAMHDSPHKSGQNQQT

SEQ ID NO: 3715 - protein, 18 aa, synthetic construct
KTIKGDDSPHKSVQNQQT

SEQ ID NO: 3716 - protein, 18 aa, synthetic construct
KTINGHDSPHKSVQSHQT

SEQ ID NO: 3717 - protein, 18 aa, synthetic construct
KTINGHDSPHKSGQFVVT

SEQ ID NO: 3718 - protein, 18 aa, synthetic construct
KTVNGHDSPHKSRQNLQT

SEQ ID NO: 3719 - protein, 18 aa, synthetic construct
KATNGHNSPHKSGQNQET

SEQ ID NO: 3720 - protein, 18 aa, synthetic construct
KAINGHDSPHKSAQNQQI

SEQ ID NO: 3721 - protein, 18 aa, synthetic construct
KTEHGHDSPHKSGQNQQT

SEQ ID NO: 3722 - protein, 18 aa, synthetic construct
KTVENHDSPHKSGQNQQT

SEQ ID NO: 3723 - protein, 18 aa, synthetic construct
KTIYGHDSPHKSGQSQPT

SEQ ID NO: 3724 - protein, 18 aa, synthetic construct
KTISGHESPHKSGQNEQT

SEQ ID NO: 3725 - protein, 18 aa, synthetic construct
KAIIGHDSPHKSAQNQQT

SEQ ID NO: 3726 - protein, 18 aa, synthetic construct
KAIDGHDSPHKSGQNQLT

SEQ ID NO: 3727 - protein, 18 aa, synthetic construct
KTIMGHDSPHKSVQNQQT

SEQ ID NO: 3728 - protein, 18 aa, synthetic construct
KEVGGHDSPHKSGQNQQT

SEQ ID NO: 3729 - protein, 18 aa, synthetic construct
KTINGHDSPHKSAQNLLT

SEQ ID NO: 3730 - protein, 18 aa, synthetic construct
KTEFTHDSPHKSGQNQQT

SEQ ID NO: 3731 - protein, 18 aa, synthetic construct
KSEMGHDSPHKSGQNQQT

SEQ ID NO: 3732 - protein, 18 aa, synthetic construct
KAQQGHDSPHKSGQNQQT

SEQ ID NO: 3733 - protein, 18 aa, synthetic construct
KTEVMHDSPHKSGQNQQT

SEQ ID NO: 3734 - protein, 18 aa, synthetic construct
KAINGHDSPHKSGQSLQT

SEQ ID NO: 3735 - protein, 18 aa, synthetic construct
KCGEGHDSPHKSGQNQQT

SEQ ID NO: 3736 - protein, 18 aa, synthetic construct
KTVNGHDSPHKSAQNHQT

SEQ ID NO: 3737 - protein, 18 aa, synthetic construct
KTVNGHDSPHKSGQTQLT

SEQ ID NO: 3738 - protein, 18 aa, synthetic construct
KTNNGHDSPHKSGRNRQT

SEQ ID NO: 3739 - protein, 18 aa, synthetic construct
KTCNEHDSPHKSGQNQQT

SEQ ID NO: 3740 - protein, 18 aa, synthetic construct
KTINGHDSPHKYGQNEQT

SEQ ID NO: 3741 - protein, 18 aa, synthetic construct
KASNRHDSPHKSGHNQQT

SEQ ID NO: 3742 - protein, 18 aa, synthetic construct
KTETKHDSPHKSGQNQQT

SEQ ID NO: 3743 - protein, 18 aa, synthetic construct
KSINGHDSPHKSQQNQQT

SEQ ID NO: 3744 - protein, 18 aa, synthetic construct
KTIGGHDSPHKSGQNQQI

SEQ ID NO: 3745 - protein, 18 aa, synthetic construct
KTDPQHDSPHKSGQNQQT

SEQ ID NO: 3746 - protein, 18 aa, synthetic construct
KTINRHDSPHKIVQNQQT

SEQ ID NO: 3747 - protein, 18 aa, synthetic construct
KTEQYHDSPHKSGQNQQT

SEQ ID NO: 3748 - protein, 18 aa, synthetic construct
KTINGHDSPHKSVQSKQT

SEQ ID NO: 3749 - protein, 18 aa, synthetic construct
KELVGHDSPHKSGQNQQT

SEQ ID NO: 3750 - protein, 18 aa, synthetic construct
KTENRHDSPHKSGQNQQT

SEQ ID NO: 3751 - protein, 18 aa, synthetic construct
KELMGHDSPHKSGQNQQT

SEQ ID NO: 3752 - protein, 18 aa, synthetic construct
KTINGNDSPHKIGHNQQT

SEQ ID NO: 3753 - protein, 18 aa, synthetic construct
KTEGHHDSPHKSGQNQQT

SEQ ID NO: 3754 - protein, 18 aa, synthetic construct
KTEGYHDSPHKSGQNQQT

SEQ ID NO: 3755 - protein, 18 aa, synthetic construct
KTVNGHDSPHKSGQTQQI

SEQ ID NO: 3756 - protein, 18 aa, synthetic construct
KTINGQDSPHKSGQNPLT

SEQ ID NO: 3757 - protein, 18 aa, synthetic construct
KTINGHDSPHKSGRDQKT

SEQ ID NO: 3758 - protein, 18 aa, synthetic construct
KTINGHDSPHKSVHNQQN

SEQ ID NO: 3759 - protein, 18 aa, synthetic construct
KTINGHDSPHKSGQWKRT

SEQ ID NO: 3760 - protein, 18 aa, synthetic construct
KNEIGHDSPHKSGQNQQT

SEQ ID NO: 3761 - protein, 18 aa, synthetic construct
KAINGHDSPHKSGQSQQI

SEQ ID NO: 3762 - protein, 18 aa, synthetic construct
KIINGHDSPHKSRQAQQT

SEQ ID NO: 3763 - protein, 18 aa, synthetic construct
KTPNGHDSPHKSGQNQQI

SEQ ID NO: 3764 - protein, 18 aa, synthetic construct
KITNGHDSPHKSGQTQQT

SEQ ID NO: 3765 - protein, 18 aa, synthetic construct
KTINGHDSPHKSVQNHQI

SEQ ID NO: 3766 - protein, 18 aa, synthetic construct
KTINGHDSPHKSKQNQQA

SEQ ID NO: 3767 - protein, 18 aa, synthetic construct
KTINGHDSPHKSAQNQLN

SEQ ID NO: 3768 - protein, 18 aa, synthetic construct
KTDITHDSPHKSGQNQQT

SEQ ID NO: 3769 - protein, 18 aa, synthetic construct
KTVNGHDSPHKSGQTQPT

SEQ ID NO: 3770 - protein, 18 aa, synthetic construct
KTEKFHDSPHKSGQNQQT

SEQ ID NO: 3771 - protein, 18 aa, synthetic construct
KTDQGHDSPHKSGQNQQT

SEQ ID NO: 3772 - protein, 18 aa, synthetic construct
KTINGHDSPHKLWINQQT

SEQ ID NO: 3773 - protein, 18 aa, synthetic construct
KGINGPDSPHKSGQNQQT

SEQ ID NO: 3774 - protein, 18 aa, synthetic construct
KSEIGHDSPHKSGQNQQT

SEQ ID NO: 3775 - protein, 18 aa, synthetic construct
KTINGHDSPHKSVQKQLT

SEQ ID NO: 3776 - protein, 18 aa, synthetic construct
KTVNGHDSPHKSGRNQLA

SEQ ID NO: 3777 - protein, 18 aa, synthetic construct
KTNNVHDSPHKSGQNQQS

SEQ ID NO: 3778 - protein, 18 aa, synthetic construct
KSEKGHDSPHKSGQNQQT

SEQ ID NO: 3779 - protein, 18 aa, synthetic construct
KWSAGHDSPHKSGQNQQT

SEQ ID NO: 3780 - protein, 18 aa, synthetic construct
KELAGHDSPHKSGQNQQT

SEQ ID NO: 3781 - protein, 18 aa, synthetic construct
KTINGHDSPHKMGRNQQS

SEQ ID NO: 3782 - protein, 18 aa, synthetic construct
KTDQAHDSPHKSGQNQQT

SEQ ID NO: 3783 - protein, 18 aa, synthetic construct
KTETQHDSPHKSGQNQQT

SEQ ID NO: 3784 - protein, 18 aa, synthetic construct
KTEMTHDSPHKSGQNQQT

SEQ ID NO: 3785 - protein, 18 aa, synthetic construct
KTINGHDSPHKSGISIQT

SEQ ID NO: 3786 - protein, 18 aa, synthetic construct
KTDAVHDSPHKSGQNQQT

SEQ ID NO: 3787 - protein, 18 aa, synthetic construct
KTSNGHDSPHKSVQNLQT

SEQ ID NO: 3788 - protein, 18 aa, synthetic construct
KTEKYHDSPHKSGQNQQT

SEQ ID NO: 3789 - protein, 18 aa, synthetic construct
KQTQGHDSPHKSGQNQQT

SEQ ID NO: 3790 - protein, 18 aa, synthetic construct
KTINGHDSPHKMAHNQQT

SEQ ID NO: 3791 - protein, 18 aa, synthetic construct
KTINGHDSPHKHGQNQQN

SEQ ID NO: 3792 - protein, 18 aa, synthetic construct
KGADGHDSPHKSGQNQQT

SEQ ID NO: 3793 - protein, 18 aa, synthetic construct
KVGEGHDSPHKSGQNQQT

SEQ ID NO: 3794 - protein, 18 aa, synthetic construct
KANEGHDSPHKSGQNQQT

SEQ ID NO: 3795 - protein, 18 aa, synthetic construct
KTDTMHDSPHKSGQNQQT

SEQ ID NO: 3796 - protein, 18 aa, synthetic construct
KTINGHDSPHKSVQSQQS

SEQ ID NO: 3797 - protein, 18 aa, synthetic construct
KTCIAHDSPHKSGQNQQT

SEQ ID NO: 3798 - protein, 18 aa, synthetic construct
KTINGHDSPHKSGQTVCT

SEQ ID NO: 3799 - protein, 18 aa, synthetic construct
KELRGHDSPHKSGQNQQT

SEQ ID NO: 3800 - protein, 18 aa, synthetic construct
KCQIGHDSPHKSGQNQQT

SEQ ID NO: 3801 - protein, 18 aa, synthetic construct
KGVMGHDSPHKSGQNQQT

SEQ ID NO: 3802 - protein, 18 aa, synthetic construct
KACDGHDSPHKSGQNQQT

SEQ ID NO: 3803 - protein, 18 aa, synthetic construct
KTINGQDSPHKSGQYQQI

SEQ ID NO: 3804 - protein, 18 aa, synthetic construct
KTINGHDSPHKSGQQIMT

SEQ ID NO: 3805 - protein, 18 aa, synthetic construct
KTINGHDSPHKSRQNEQS

SEQ ID NO: 3806 - protein, 18 aa, synthetic construct
KASNGHDSPHKSGLNHQT

SEQ ID NO: 3807 - protein, 18 aa, synthetic construct
KTVNGHDSPHKSGQSQPT

SEQ ID NO: 3808 - protein, 18 aa, synthetic construct
KNELGHDSPHKSGQNQQT

SEQ ID NO: 3809 - protein, 18 aa, synthetic construct
KTETFHDSPHKSGQNQQT

SEQ ID NO: 3810 - protein, 18 aa, synthetic construct
KAAEGHDSPHKSGQNQQT

SEQ ID NO: 3811 - protein, 18 aa, synthetic construct
KGQNGHDSPHKSGQNQQT

SEQ ID NO: 3812 - protein, 18 aa, synthetic construct
KNEFGHDSPHKSGQNQQT

SEQ ID NO: 3813 - protein, 18 aa, synthetic construct
KTSIGYDSPHKSGQNQQT

SEQ ID NO: 3814 - protein, 18 aa, synthetic construct
KTDNGHDSPHKSGQNLQT

SEQ ID NO: 3815 - protein, 18 aa, synthetic construct
KTEGQHDSPHKSGQNQQT

SEQ ID NO: 3816 - protein, 18 aa, synthetic construct
KTITGHDSPHKSRQDQQT

SEQ ID NO: 3817 - protein, 18 aa, synthetic construct
KAEHGHDSPHKSGQNQQT

SEQ ID NO: 3818 - protein, 18 aa, synthetic construct
KTINGDDSPHKSGQKQLT

SEQ ID NO: 3819 - protein, 18 aa, synthetic construct
KCDQGHDSPHKSGQNQQT

SEQ ID NO: 3820 - protein, 18 aa, synthetic construct
KEILGHDSPHKSGQNQQT

SEQ ID NO: 3821 - protein, 18 aa, synthetic construct
KTERNHDSPHKSGQNQQT

SEQ ID NO: 3822 - protein, 18 aa, synthetic construct
KAINGDDSPHKSGHNQQT

SEQ ID NO: 3823 - protein, 18 aa, synthetic construct
KTSNGHNSPHKSGQNQET

SEQ ID NO: 3824 - protein, 18 aa, synthetic construct
KTINGHDSPHKSGQMIHT

SEQ ID NO: 3825 - protein, 18 aa, synthetic construct
KNAIGHDSPHKSGQNQQT

SEQ ID NO: 3826 - protein, 18 aa, synthetic construct
KTDKFHDSPHKSGQNQQT

SEQ ID NO: 3827 - protein, 18 aa, synthetic construct
KTEGFHDSPHKSGQNQQT

SEQ ID NO: 3828 - protein, 18 aa, synthetic construct
KVINGHDSPHKSGRNHQS

SEQ ID NO: 3829 - protein, 18 aa, synthetic construct
KTITGHDSPHKSVQNRQT

SEQ ID NO: 3830 - protein, 18 aa, synthetic construct
KTPDMHDSPHKSGQNQQT

SEQ ID NO: 3831 - protein, 18 aa, synthetic construct
KTINGHDSPHKSGQKMNT

SEQ ID NO: 3832 - protein, 18 aa, synthetic construct
KTELQHDSPHKSGQNQQT

SEQ ID NO: 3833 - protein, 18 aa, synthetic construct
KTIHGHDSPHKSGQSQQN

SEQ ID NO: 3834 - protein, 18 aa, synthetic construct
KTEIGHDSPHKSGQNQQT

SEQ ID NO: 3835 - protein, 18 aa, synthetic construct
KTINGHDSPHKSGQYQHA

SEQ ID NO: 3836 - protein, 18 aa, synthetic construct
KTELYHDSPHKSGQNQQT

SEQ ID NO: 3837 - protein, 18 aa, synthetic construct
KTINGRGSPHKRGQNQQT

SEQ ID NO: 3838 - protein, 18 aa, synthetic construct
KTINGHGSPHSKAQNPQT

SEQ ID NO: 3839 - protein, 18 aa, synthetic construct
KTFNGSASPHSKALNQQT

SEQ ID NO: 3840 - protein, 18 aa, synthetic construct
KTINGCGSPHASGQNQQT

SEQ ID NO: 3841 - protein, 18 aa, synthetic construct
KTINGNGSPHSKAQNHQA

SEQ ID NO: 3842 - protein, 18 aa, synthetic construct
KTINGMGSPHSKTQNQQT

SEQ ID NO: 3843 - protein, 18 aa, synthetic construct
KTVNGTGSPHSKAQNQLT

SEQ ID NO: 3844 - protein, 18 aa, synthetic construct
KTIHGNGSPHSKAQNQET

SEQ ID NO: 3845 - protein, 18 aa, synthetic construct
KAINGNGSPHKRGQNQQT

SEQ ID NO: 3846 - protein, 18 aa, synthetic construct
KTINGNGSPHSKAPNLQT

SEQ ID NO: 3847 - protein, 18 aa, synthetic construct
KTIKGGGSPHSKAQDQQT

SEQ ID NO: 3848 - protein, 18 aa, synthetic construct
KTINGHPSPHWKGQNQQT

SEQ ID NO: 3849 - protein, 18 aa, synthetic construct
KTINGSGSPHIVWQNQQT

SEQ ID NO: 3850 - protein, 18 aa, synthetic construct
KTINGSGSPHSKYFMQQT

SEQ ID NO: 3851 - protein, 18 aa, synthetic construct
KTINGSGSPHSKARQRQT

SEQ ID NO: 3852 - protein, 18 aa, synthetic construct
KTINGSGSPHSCHQNQQT

SEQ ID NO: 3853 - protein, 18 aa, synthetic construct
KTINGSGSPHFPWQNQQT

SEQ ID NO: 3854 - protein, 18 aa, synthetic construct
KTINGSGSPHSKIRRQQT

SEQ ID NO: 3855 - protein, 18 aa, synthetic construct
KTINGSGSPHVYYQNQQT

SEQ ID NO: 3856 - protein, 18 aa, synthetic construct
KTINGSGSPHSLYWNQQT

SEQ ID NO: 3857 - protein, 18 aa, synthetic construct
KTINGSGSPHSKPKRQQT

SEQ ID NO: 3858 - protein, 18 aa, synthetic construct
KPRWGSGSPHSKAQNQQT

SEQ ID NO: 3859 - protein, 18 aa, synthetic construct
KTINGSGSPHSKAFSWQT

SEQ ID NO: 3860 - protein, 18 aa, synthetic construct
KTINGSGSPHSRFWNQQT

SEQ ID NO: 3861 - protein, 18 aa, synthetic construct
KTINGSGSPHSKAQCLKT

SEQ ID NO: 3862 - protein, 18 aa, synthetic construct
KTINGSGSPHSRMRNQQT

SEQ ID NO: 3863 - protein, 18 aa, synthetic construct
KTINGSGSPHSVKKNQQT

SEQ ID NO: 3864 - protein, 18 aa, synthetic construct
KTINGSGSPHSWAPNQQT

SEQ ID NO: 3865 - protein, 18 aa, synthetic construct
KTINGSGSPHSLWKNQQT

SEQ ID NO: 3866 - protein, 18 aa, synthetic construct
KTINGSGSPHSKARWQQT

SEQ ID NO: 3867 - protein, 18 aa, synthetic construct
KTINGSGSPHSFRPNQQT

SEQ ID NO: 3868 - protein, 18 aa, synthetic construct
KTINGSGSPHSKKVFQQT

SEQ ID NO: 3869 - protein, 18 aa, synthetic construct
KTINGSGSPHSYAFNQQT

SEQ ID NO: 3870 - protein, 18 aa, synthetic construct
KTINGSGSPHSKACSRQT

SEQ ID NO: 3871 - protein, 18 aa, synthetic construct
KYSAGSGSPHSKAQNQQT

SEQ ID NO: 3872 - protein, 18 aa, synthetic construct
KTINGSGSPHSKRLWQQT

SEQ ID NO: 3873 - protein, 18 aa, synthetic construct
KTINGSGSPHSCSRNQQT

SEQ ID NO: 3874 - protein, 18 aa, synthetic construct
KTINGSGSPHSRCPNQQT

SEQ ID NO: 3875 - protein, 18 aa, synthetic construct
KTINGSGSPHSGACNQQT

SEQ ID NO: 3876 - protein, 18 aa, synthetic construct
KYYTGSGSPHSKAQNQQT

SEQ ID NO: 3877 - protein, 18 aa, synthetic construct
KTINGSGSPHSKFRQQQT

SEQ ID NO: 3878 - protein, 18 aa, synthetic construct
KTINGSGSPHSFPFNQQT

SEQ ID NO: 3879 - protein, 18 aa, synthetic construct
KTINGSGSPHSFFGNQQT

SEQ ID NO: 3880 - protein, 18 aa, synthetic construct
KTINGSGSPHSMCQNQQT

SEQ ID NO: 3881 - protein, 18 aa, synthetic construct
KTINGSGSPHSKLFWQQT

SEQ ID NO: 3882 - protein, 18 aa, synthetic construct
KTINGSGSPHSKTRKQQT

SEQ ID NO: 3883 - protein, 18 aa, synthetic construct
KTINGSGSPHSGKRNQQT

SEQ ID NO: 3884 - protein, 18 aa, synthetic construct
KTINGSGSPHSKAQNFKR

SEQ ID NO: 3885 - protein, 18 aa, synthetic construct
KTINGSGSPHFYRQNQQT

SEQ ID NO: 3886 - protein, 18 aa, synthetic construct
KTINGSGSPHCRVQNQQT

SEQ ID NO: 3887 - protein, 18 aa, synthetic construct
KTINGSGSPHYGIQNQQT

SEQ ID NO: 3888 - protein, 18 aa, synthetic construct
KTINGSGSPHSKAQRFKT

SEQ ID NO: 3889 - protein, 18 aa, synthetic construct
KTINGSGSPHVNCQNQQT

SEQ ID NO: 3890 - protein, 18 aa, synthetic construct
KTINGSGSPHSKPFRQQT

SEQ ID NO: 3891 - protein, 18 aa, synthetic construct
KTINGSGSPHSLAWNQQT

SEQ ID NO: 3892 - protein, 18 aa, synthetic construct
KTINGSGSPHSKRSYQQT

SEQ ID NO: 3893 - protein, 18 aa, synthetic construct
KTINGSGSPHWSYQNQQT

SEQ ID NO: 3894 - protein, 18 aa, synthetic construct
KTINGSGSPHRWLQNQQT

SEQ ID NO: 3895 - protein, 18 aa, synthetic construct
KTINGSGSPHPSCQNQQT

SEQ ID NO: 3896 - protein, 18 aa, synthetic construct
KTINGSGSPHSSWLNQQT

SEQ ID NO: 3897 - protein, 18 aa, synthetic construct
KPRFGSGSPHSKAQNQQT

SEQ ID NO: 3898 - protein, 18 aa, synthetic construct
KWLTGSGSPHSKAQNQQT

SEQ ID NO: 3899 - protein, 18 aa, synthetic construct
KTINGSGSPHSKRRAQQT

SEQ ID NO: 3900 - protein, 18 aa, synthetic construct
KTINGSGSPHSKAQTCRT

SEQ ID NO: 3901 - protein, 18 aa, synthetic construct
KTINGSGSPHSKGCTQQT

SEQ ID NO: 3902 - protein, 18 aa, synthetic construct
KTINGSGSPHVPWQNQQT

SEQ ID NO: 3903 - protein, 18 aa, synthetic construct
KTINGSGSPHSKRYTQQT

SEQ ID NO: 3904 - protein, 18 aa, synthetic construct
KTINGSGSPHSGCQNQQT

SEQ ID NO: 3905 - protein, 18 aa, synthetic construct
KTINGSGSPHSFTPNQQT

SEQ ID NO: 3906 - protein, 18 aa, synthetic construct
KTINGSGSPHSTTCNQQT

SEQ ID NO: 3907 - protein, 18 aa, synthetic construct
KTINGSGSPHSKARMYQT

SEQ ID NO: 3908 - protein, 18 aa, synthetic construct
KTINGSGSPHPKRQNQQT

SEQ ID NO: 3909 - protein, 18 aa, synthetic construct
KTINGSGSPHSKCFLQQT

SEQ ID NO: 3910 - protein, 18 aa, synthetic construct
KTINGSGSPHWVPQNQQT

SEQ ID NO: 3911 - protein, 18 aa, synthetic construct
KTINGSGSPHSFWSNQQT

SEQ ID NO: 3912 - protein, 18 aa, synthetic construct
KRSYGSGSPHSKAQNQQT

SEQ ID NO: 3913 - protein, 18 aa, synthetic construct
KYVFGSGSPHSKAQNQQT

SEQ ID NO: 3914 - protein, 18 aa, synthetic construct
KTINGSGSPHSKFKNQQT

SEQ ID NO: 3915 - protein, 18 aa, synthetic construct
KTINGSGSPHRIKQNQQT

SEQ ID NO: 3916 - protein, 18 aa, synthetic construct
KTINGSGSPHSKAPRRQT

SEQ ID NO: 3917 - protein, 18 aa, synthetic construct
KTINGSGSPHSFRYNQQT

SEQ ID NO: 3918 - protein, 18 aa, synthetic construct
KTINGSGSPHSKMICQQT

SEQ ID NO: 3919 - protein, 18 aa, synthetic construct
KTINGSGSPHLRWQNQQT

SEQ ID NO: 3920 - protein, 18 aa, synthetic construct
KTINGSGSPHLPTQNQQT

SEQ ID NO: 3921 - protein, 18 aa, synthetic construct
KTINGSGSPHSKWKSQQT

SEQ ID NO: 3922 - protein, 18 aa, synthetic construct
KTINGSGSPHSYMRNQQT

SEQ ID NO: 3923 - protein, 18 aa, synthetic construct
KTINGSGSPHSKAARRQT

SEQ ID NO: 3924 - protein, 18 aa, synthetic construct
KTINGSGSPHLLCQNQQT

SEQ ID NO: 3925 - protein, 18 aa, synthetic construct
KTINGSGSPHRCCQNQQT

SEQ ID NO: 3926 - protein, 18 aa, synthetic construct
KTINGSGSPHLCVQNQQT

SEQ ID NO: 3927 - protein, 18 aa, synthetic construct
KTINGSGSPHSKLTRQQT

SEQ ID NO: 3928 - protein, 18 aa, synthetic construct
KTINGSGSPHSKLCTQQT

SEQ ID NO: 3929 - protein, 18 aa, synthetic construct
KKHLGSGSPHSKAQNQQT

SEQ ID NO: 3930 - protein, 18 aa, synthetic construct
KTINGSGSPHSKIRGQQT

SEQ ID NO: 3931 - protein, 18 aa, synthetic construct
KTINGSGSPHSYLVNQQT

SEQ ID NO: 3932 - protein, 18 aa, synthetic construct
KTINGSGSPHQGCQNQQT

SEQ ID NO: 3933 - protein, 18 aa, synthetic construct
KTINGSGSPHMAFQNQQT

SEQ ID NO: 3934 - protein, 18 aa, synthetic construct
KTINGSGSPHSKACQFQT

SEQ ID NO: 3935 - protein, 18 aa, synthetic construct
KTINGSGSPHSKWGLQQT

SEQ ID NO: 3936 - protein, 18 aa, synthetic construct
KTINGSGSPHSKILRQQT

SEQ ID NO: 3937 - protein, 18 aa, synthetic construct
KTINGSGSPHSFQINQQT

SEQ ID NO: 3938 - protein, 18 aa, synthetic construct
KTINGSGSPHSKACISQT

SEQ ID NO: 3939 - protein, 18 aa, synthetic construct
KTINGSGSPHSKAQTHRT

SEQ ID NO: 3940 - protein, 18 aa, synthetic construct
KTINGSGSPHSKALRCQT

SEQ ID NO: 3941 - protein, 18 aa, synthetic construct
KTINGSGSPHSKAFYIQT

SEQ ID NO: 3942 - protein, 18 aa, synthetic construct
KTINGSGSPHSKAHARQT

SEQ ID NO: 3943 - protein, 18 aa, synthetic construct
KTINGSGSPHSLCLNQQT

SEQ ID NO: 3944 - protein, 18 aa, synthetic construct
KTINGSGSPHSKAFVRQT

SEQ ID NO: 3945 - protein, 18 aa, synthetic construct
KPPLGSGSPHSKAQNQQT

SEQ ID NO: 3946 - protein, 18 aa, synthetic construct
KTINGSGSPHRPWQNQQT

SEQ ID NO: 3947 - protein, 18 aa, synthetic construct
KPARGSGSPHSKAQNQQT

SEQ ID NO: 3948 - protein, 18 aa, synthetic construct
KTINGSGSPHRPRQNQQT

SEQ ID NO: 3949 - protein, 18 aa, synthetic construct
KTINGSGSPHSCPQNQQT

SEQ ID NO: 3950 - protein, 18 aa, synthetic construct
KTINGSGSPHSKAQFILT

SEQ ID NO: 3951 - protein, 18 aa, synthetic construct
KTINGSGSPHSVRYNQQT

SEQ ID NO: 3952 - protein, 18 aa, synthetic construct
KSRRGSGSPHSKAQNQQT

SEQ ID NO: 3953 - protein, 18 aa, synthetic construct
KTINGSGSPHSVRCNQQT

SEQ ID NO: 3954 - protein, 18 aa, synthetic construct
KFFHGSGSPHSKAQNQQT

SEQ ID NO: 3955 - protein, 18 aa, synthetic construct
KTINGSGSPHSKMPCQQT

SEQ ID NO: 3956 - protein, 18 aa, synthetic construct
KTINGSGSPHSKKTSQQT

SEQ ID NO: 3957 - protein, 18 aa, synthetic construct
KRYNGSGSPHSKAQNQQT

SEQ ID NO: 3958 - protein, 18 aa, synthetic construct
KTINGSGSPHSLPYNQQT

SEQ ID NO: 3959 - protein, 18 aa, synthetic construct
KTINGSGSPHVYHQNQQT

SEQ ID NO: 3960 - protein, 18 aa, synthetic construct
KTINGSGSPHSKAQSRKT

SEQ ID NO: 3961 - protein, 18 aa, synthetic construct
KTINGSGSPHSYTRNQQT

SEQ ID NO: 3962 - protein, 18 aa, synthetic construct
KTINGSGSPHLVYQNQQT

SEQ ID NO: 3963 - protein, 18 aa, synthetic construct
KTINGSGSPHSKALRWQT

SEQ ID NO: 3964 - protein, 18 aa, synthetic construct
KTINGSGSPHYRYQNQQT

SEQ ID NO: 3965 - protein, 18 aa, synthetic construct
KTINGSGSPHSWLKNQQT

SEQ ID NO: 3966 - protein, 18 aa, synthetic construct
KTINGSGSPHSKAQMQIT

SEQ ID NO: 3967 - protein, 18 aa, synthetic construct
KTINGSGSPHCPAQNQQT

SEQ ID NO: 3968 - protein, 18 aa, synthetic construct
KTINGSGSPHSMCTNQQT

SEQ ID NO: 3969 - protein, 18 aa, synthetic construct
KTINGSGSPHSPPDNQQT

SEQ ID NO: 3970 - protein, 18 aa, synthetic construct
KTINGSGSPHSKRNYQQT

SEQ ID NO: 3971 - protein, 18 aa, synthetic construct
KTINGSGSPHRWTQNQQT

SEQ ID NO: 3972 - protein, 18 aa, synthetic construct
KTINGSGSPHSKACRLQT

SEQ ID NO: 3973 - protein, 18 aa, synthetic construct
KTINGSGSPHPRKQNQQT

SEQ ID NO: 3974 - protein, 18 aa, synthetic construct
KTINGSGSPHSKCSVQQT

SEQ ID NO: 3975 - protein, 18 aa, synthetic construct
KTINGSGSPHSKAQYVRT

SEQ ID NO: 3976 - protein, 18 aa, synthetic construct
KTINGSGSPHSKARISQT

SEQ ID NO: 3977 - protein, 18 aa, synthetic construct
KTINGSGSPHPFVQNQQT

SEQ ID NO: 3978 - protein, 18 aa, synthetic construct
KTINGSGSPHSKLPKQQT

SEQ ID NO: 3979 - protein, 18 aa, synthetic construct
KTINGSGSPHSKSEQQQT

SEQ ID NO: 3980 - protein, 18 aa, synthetic construct
KTINGSGSPHWVAQNQQT

SEQ ID NO: 3981 - protein, 18 aa, synthetic construct
KTINGSGSPHSLYQNQQT

SEQ ID NO: 3982 - protein, 18 aa, synthetic construct
KTINGSGSPHSKVRMQQT

SEQ ID NO: 3983 - protein, 18 aa, synthetic construct
KTINYTRSPHSKAQNQQT

SEQ ID NO: 3984 - protein, 18 aa, synthetic construct
KTINGSGSPHSSCTNQQT

SEQ ID NO: 3985 - protein, 18 aa, synthetic construct
KTINGSGSPHSKNSRQQT

SEQ ID NO: 3986 - protein, 18 aa, synthetic construct
KTINGSGSPHSKRKRQQT

SEQ ID NO: 3987 - protein, 18 aa, synthetic construct
KTINGSGSPHLCTQNQQT

SEQ ID NO: 3988 - protein, 18 aa, synthetic construct
KTINGSGSPHSKAQSAKT

SEQ ID NO: 3989 - protein, 18 aa, synthetic construct
KTINGSGSPHSTCLNQQT

SEQ ID NO: 3990 - protein, 18 aa, synthetic construct
KTINGSGSPHSYARNQQT

SEQ ID NO: 3991 - protein, 18 aa, synthetic construct
KTINGSGSPHSKQRPQQT

SEQ ID NO: 3992 - protein, 18 aa, synthetic construct
KTINGSGSPHSKRVVQQT

SEQ ID NO: 3993 - protein, 18 aa, synthetic construct
KRFSGSGSPHSKAQNQQT

SEQ ID NO: 3994 - protein, 18 aa, synthetic construct
KTINGSGSPHKSGQNPQT

SEQ ID NO: 3995 - protein, 18 aa, synthetic construct
KTINGSGSPHSKALRHQT

SEQ ID NO: 3996 - protein, 18 aa, synthetic construct
KTINGSGSPHSYYSNQQT

SEQ ID NO: 3997 - protein, 18 aa, synthetic construct
KTINGSGSPHSLTCNQQT

SEQ ID NO: 3998 - protein, 18 aa, synthetic construct
KTINGSGSPHSCQSNQQT

SEQ ID NO: 3999 - protein, 18 aa, synthetic construct
KTINGSGSPHSKAQSIKT

SEQ ID NO: 4000 - protein, 18 aa, synthetic construct
KYSMGSGSPHSKAQNQQT

SEQ ID NO: 4001 - protein, 18 aa, synthetic construct
KTINGSGSPHSKAKGWQT

SEQ ID NO: 4002 - protein, 18 aa, synthetic construct
KTIVGSGSPHSKPQNQQT

SEQ ID NO: 4003 - protein, 18 aa, synthetic construct
KTINGSGSPHFPFQNQQT

SEQ ID NO: 4004 - protein, 18 aa, synthetic construct
KPFLGSGSPHSKAQNQQT

SEQ ID NO: 4005 - protein, 18 aa, synthetic construct
KTINGSGSPHSKCTSQQT

SEQ ID NO: 4006 - protein, 18 aa, synthetic construct
KTINGSGSPHSVFENQQT

SEQ ID NO: 4007 - protein, 18 aa, synthetic construct
KTINGSGSPHSKAKKVQT

SEQ ID NO: 4008 - protein, 18 aa, synthetic construct
KTINGSGSPHSKAQRCST

SEQ ID NO: 4009 - protein, 18 aa, synthetic construct
KTINGSGSPHSKAQFCLT

SEQ ID NO: 4010 - protein, 18 aa, synthetic construct
KTINGSGSPHGRYQNQQT

SEQ ID NO: 4011 - protein, 18 aa, synthetic construct
KTQRKSGSPHSKAQNQQT

SEQ ID NO: 4012 - protein, 18 aa, synthetic construct
KTINGSYSPHCLAQNQQT

SEQ ID NO: 4013 - protein, 18 aa, synthetic construct
KTINGSLSPHFWAQNQQT

SEQ ID NO: 4014 - protein, 18 aa, synthetic construct
KTINHRISPHSKAQNQQT

SEQ ID NO: 4015 - protein, 18 aa, synthetic construct
KTRRPSGSPHSKAQNQQT

SEQ ID NO: 4016 - protein, 18 aa, synthetic construct
KTINGAYSPHRKAQNQQT

SEQ ID NO: 4017 - protein, 18 aa, synthetic construct
KTINGRRSPHGKAQNQQT

SEQ ID NO: 4018 - protein, 18 aa, synthetic construct
KTINGRTSPHRKAQNQQT

SEQ ID NO: 4019 - protein, 18 aa, synthetic construct
KTINGSRSPHAWAQNQQT

SEQ ID NO: 4020 - protein, 18 aa, synthetic construct
KTINKCLSPHSKAQNQQT

SEQ ID NO: 4021 - protein, 18 aa, synthetic construct
KTINGSSSPHRCAQNQQT

SEQ ID NO: 4022 - protein, 18 aa, synthetic construct
KTINCRTSPHSKAQNQQT

SEQ ID NO: 4023 - protein, 18 aa, synthetic construct
KTIFDCGSPHSKAQNQQT

SEQ ID NO: 4024 - protein, 18 aa, synthetic construct
KTINSPRSPHSKAQNQQT

SEQ ID NO: 4025 - protein, 18 aa, synthetic construct
KTINGLDSPHRSRQNQQT

SEQ ID NO: 4026 - protein, 18 aa, synthetic construct
KTRTRSGSPHSKAQNQQT

SEQ ID NO: 4027 - protein, 18 aa, synthetic construct
KTINGSISPHCPAQNQQT

SEQ ID NO: 4028 - protein, 18 aa, synthetic construct
KTINGLVSPHRKAQNQQT

SEQ ID NO: 4029 - protein, 18 aa, synthetic construct
KTINALRSPHSKAQNQQT

SEQ ID NO: 4030 - protein, 18 aa, synthetic construct
KTICGRGSPHSKAQNQQT

SEQ ID NO: 4031 - protein, 18 aa, synthetic construct
KTTRKSGSPHSKAQNQQT

SEQ ID NO: 4032 - protein, 18 aa, synthetic construct
KTMQRSGSPHSKAQNQQT

SEQ ID NO: 4033 - protein, 18 aa, synthetic construct
KTINGSSSPHWMAQNQQT

SEQ ID NO: 4034 - protein, 18 aa, synthetic construct
KTRKRSGSPHSKAQNQQT

SEQ ID NO: 4035 - protein, 18 aa, synthetic construct
KTINFTRSPHSKAQNQQT

SEQ ID NO: 4036 - protein, 18 aa, synthetic construct
KTINNLRSPHSKAQNQQT

SEQ ID NO: 4037 - protein, 18 aa, synthetic construct
KTINGRPSPHGKAQNQQT

SEQ ID NO: 4038 - protein, 18 aa, synthetic construct
KTINWSRSPHSKAQNQQT

SEQ ID NO: 4039 - protein, 18 aa, synthetic construct
KTINGTRSPHKKAQNQQT

SEQ ID NO: 4040 - protein, 18 aa, synthetic construct
KTINGSVSPHCTAQNQQT

SEQ ID NO: 4041 - protein, 18 aa, synthetic construct
KTTRCSGSPHSKAQNQQT

SEQ ID NO: 4042 - protein, 18 aa, synthetic construct
KTKLCSGSPHSKAQNQQT

SEQ ID NO: 4043 - protein, 18 aa, synthetic construct
KTINLGCSPHSKAQNQQT

SEQ ID NO: 4044 - protein, 18 aa, synthetic construct
KTISGHDSPHISGQYQQT

SEQ ID NO: 4045 - protein, 18 aa, synthetic construct
KTINGRRSPHMKAQNQQT

SEQ ID NO: 4046 - protein, 18 aa, synthetic construct
KTINGPWSPHRKAQNQQT

SEQ ID NO: 4047 - protein, 18 aa, synthetic construct
KTINSCFSPHSKAQNQQT

SEQ ID NO: 4048 - protein, 18 aa, synthetic construct
KTIKRYGSPHSKAQNQQT

SEQ ID NO: 4049 - protein, 18 aa, synthetic construct
KTINRYSSPHSKAQNQQT

SEQ ID NO: 4050 - protein, 18 aa, synthetic construct
KTTGRSGSPHSKAQNQQT

SEQ ID NO: 4051 - protein, 18 aa, synthetic construct
KTINRQFSPHSKAQNQQT

SEQ ID NO: 4052 - protein, 18 aa, synthetic construct
KTITGHDSPHSKAQNQQT

SEQ ID NO: 4053 - protein, 18 aa, synthetic construct
KTINGSGSPHKSGQYQQT

SEQ ID NO: 4054 - protein, 18 aa, synthetic construct
KTINGSGSPHKSGQDQQT

SEQ ID NO: 4055 - protein, 18 aa, synthetic construct
KTINGSGSPHKSGQIQQT

SEQ ID NO: 4056 - protein, 18 aa, synthetic construct
KTINGSGSPHKSGRNQQT

SEQ ID NO: 4057 - protein, 18 aa, synthetic construct
KTINGSGSPHKSGKNQQT

SEQ ID NO: 4058 - protein, 18 aa, synthetic construct
KTIYGHDSPHSKAQNQQT

SEQ ID NO: 4059 - protein, 18 aa, synthetic construct
KTINGSGSPHKSGQNQQS

SEQ ID NO: 4060 - protein, 18 aa, synthetic construct
KTINGSGSPHKSGQNLQT

SEQ ID NO: 4061 - protein, 18 aa, synthetic construct
KAINGHDSPHSKAQNQQT

SEQ ID NO: 4062 - protein, 18 aa, synthetic construct
KTVNGHDSPHSKAQNQQT

SEQ ID NO: 4063 - protein, 18 aa, synthetic construct
KTIKGHDSPHSKAQNQQT

SEQ ID NO: 4064 - protein, 18 aa, synthetic construct
KSINGHDSPHSKAQNQQT

SEQ ID NO: 4065 - protein, 18 aa, synthetic construct
KTINGSGSPHKSGQTQQT

SEQ ID NO: 4066 - protein, 18 aa, synthetic construct
KTINGSGSPHKSGHNQQT

SEQ ID NO: 4067 - protein, 18 aa, synthetic construct
KTFNGHDSPHSKAQNQQT

SEQ ID NO: 4068 - protein, 18 aa, synthetic construct
KTINGSGSPHKSGLNQQT

SEQ ID NO: 4069 - protein, 18 aa, synthetic construct
KTINGHDSPHSKALNQQT

SEQ ID NO: 4070 - protein, 18 aa, synthetic construct
KTINGSGSPHKSGQNQLT

SEQ ID NO: 4071 - protein, 18 aa, synthetic construct
KTLNGHDSPHSKAQNQQT

SEQ ID NO: 4072 - protein, 18 aa, synthetic construct
KTINGSGSPHKSGQNQHT

SEQ ID NO: 4073 - protein, 18 aa, synthetic construct
KTIDGHDSPHSKAQNQQT

SEQ ID NO: 4074 - protein, 18 aa, synthetic construct
KTNNGHDSPHSKAQNQQT

SEQ ID NO: 4075 - protein, 18 aa, synthetic construct
KTINGSGSPHKSGQKQQT

SEQ ID NO: 4076 - protein, 18 aa, synthetic construct
KTINGSGSPHKSGQNRQT

SEQ ID NO: 4077 - protein, 18 aa, synthetic construct
KTINGSGSPHKSGQNQQN

SEQ ID NO: 4078 - protein, 18 aa, synthetic construct
KTINGSGSPHKSGQNQQA

SEQ ID NO: 4079 - protein, 18 aa, synthetic construct
KTINGHDSPHSKAHNQQT

SEQ ID NO: 4080 - protein, 18 aa, synthetic construct
KTINGHDSPHSKAQNQQT

SEQ ID NO: 4081 - protein, 18 aa, synthetic construct
KTINGSGSPHKSGQNQQP

SEQ ID NO: 4082 - protein, 18 aa, synthetic construct
KTINGHDSPHCKAQNQQT

SEQ ID NO: 4083 - protein, 18 aa, synthetic construct
KTINGHDSPHSKAQNQQS

SEQ ID NO: 4084 - protein, 18 aa, synthetic construct
KTINGSGSPHKSGQNQQT

SEQ ID NO: 4085 - protein, 18 aa, synthetic construct
KTINGHDSPDKSGQNQQT

SEQ ID NO: 4086 - protein, 18 aa, synthetic construct
KPINGHDSPHKSGQNHQS

SEQ ID NO: 4087 - protein, 18 aa, synthetic construct
KTSNGSGSPHKSGQNQQT

SEQ ID NO: 4088 - protein, 18 aa, synthetic construct
KTVNGSGSPHKSGQNQQT

SEQ ID NO: 4089 - protein, 18 aa, synthetic construct
KTINGHDSTHKSGHNQQT

SEQ ID NO: 4090 - protein, 18 aa, synthetic construct
KTINGHDSPHSKAQNQQN

SEQ ID NO: 4091 - protein, 18 aa, synthetic construct
KTIYGSGSPHKSGQNQQT

SEQ ID NO: 4092 - protein, 18 aa, synthetic construct
KTINGLDSQHKSGQNQQT

SEQ ID NO: 4093-4094 - skipped (2 entries)

SEQ ID NO: 4095 - protein, 18 aa, synthetic construct
KTIIGHDSPHSKAQNQQT

SEQ ID NO: 4096 - protein, 18 aa, synthetic construct
KTSNGHDSPHSKAQNQQT

SEQ ID NO: 4097 - protein, 18 aa, synthetic construct
KTINGSGSPHSKAQNRRR

SEQ ID NO: 4098 - protein, 18 aa, synthetic construct
KTISKRGSPHSKAQNQQT

SEQ ID NO: 4099 - protein, 18 aa, synthetic construct
KGLGGSGSPHSKAQNQQT

SEQ ID NO: 4100 - protein, 18 aa, synthetic construct
KTINGHDSPHSKAQNLQT

SEQ ID NO: 4101 - protein, 18 aa, synthetic construct
KTINGHDSPHSKAQNQQI

SEQ ID NO: 4102 - protein, 18 aa, synthetic construct
KTINGSGSPHFTRQNQQT

SEQ ID NO: 4103 - protein, 18 aa, synthetic construct
KTINGSGSPHSLPWNQQT

SEQ ID NO: 4104 - protein, 18 aa, synthetic construct
KTINGHDSPHSKAQNHQT

SEQ ID NO: 4105 - protein, 18 aa, synthetic construct
KTMNGHDSPHSKAQNQQT

SEQ ID NO: 4106 - protein, 18 aa, synthetic construct
KPYKGSGSPHSKAQNQQT

SEQ ID NO: 4107 - protein, 18 aa, synthetic construct
KRLWGSGSPHSKAQNQQT

SEQ ID NO: 4108 - protein, 18 aa, synthetic construct
KRMRGSGSPHSKAQNQQT

SEQ ID NO: 4109 - protein, 18 aa, synthetic construct
KRTYGSGSPHSKAQNQQT

SEQ ID NO: 4110 - protein, 18 aa, synthetic construct
KTINCLRSPHSKAQNQQT

SEQ ID NO: 4111 - protein, 18 aa, synthetic construct
KTINFSRSPHSKAQNQQT

SEQ ID NO: 4112 - protein, 18 aa, synthetic construct
KTINGLRSPHFKAQNQQT

SEQ ID NO: 4113 - protein, 18 aa, synthetic construct
KTINGNRSPHNKAQNQQT

SEQ ID NO: 4114 - protein, 18 aa, synthetic construct
KTINGPRSPHYKAQNQQT

SEQ ID NO: 4115 - protein, 18 aa, synthetic construct
KTINGQASPHWKAQNQQT

SEQ ID NO: 4116 - protein, 18 aa, synthetic construct
KTINGRCSPHSKAQNQQT

SEQ ID NO: 4117 - protein, 18 aa, synthetic construct
KTINGRHSPHSKAQNQQT

SEQ ID NO: 4118 - protein, 18 aa, synthetic construct
KTINGRKSPHRKAQNQQT

SEQ ID NO: 4119 - protein, 18 aa, synthetic construct
KTINGRLSPHWKAQNQQT

SEQ ID NO: 4120 - protein, 18 aa, synthetic construct
KTINGRLSPHYKAQNQQT

SEQ ID NO: 4121 - protein, 18 aa, synthetic construct
KTINGRPSPHMKAQNQQT

SEQ ID NO: 4122 - protein, 18 aa, synthetic construct
KTINGRSSPHWKAQNQQT

SEQ ID NO: 4123 - protein, 18 aa, synthetic construct
KTINGRWSPHSKAQNQQT

SEQ ID NO: 4124 - protein, 18 aa, synthetic construct
KTINGSGSPHAPCQNQQT

SEQ ID NO: 4125 - protein, 18 aa, synthetic construct
KTINGSGSPHAWAQNQQT

SEQ ID NO: 4126 - protein, 18 aa, synthetic construct
KTINGSGSPHCMRQNQQT

SEQ ID NO: 4127 - protein, 18 aa, synthetic construct
KTINGSGSPHFCSQNQQT

SEQ ID NO: 4128 - protein, 18 aa, synthetic construct
KTINGSGSPHFLFQNQQT

SEQ ID NO: 4129 - protein, 18 aa, synthetic construct
KTINGSGSPHFWAQNQQT

SEQ ID NO: 4130 - protein, 18 aa, synthetic construct
KTINGSGSPHLCAQNQQT

SEQ ID NO: 4131 - protein, 18 aa, synthetic construct
KTINGSGSPHLRYQNQQT

SEQ ID NO: 4132 - protein, 18 aa, synthetic construct
KTINGSGSPHLYYQNQQT

SEQ ID NO: 4133 - protein, 18 aa, synthetic construct
KTINGSGSPHPLCQNQQT

SEQ ID NO: 4134 - protein, 18 aa, synthetic construct
KTINGSGSPHRIRQNQQT

SEQ ID NO: 4135 - protein, 18 aa, synthetic construct
KTINGSGSPHRLFQNQQT

SEQ ID NO: 4136 - protein, 18 aa, synthetic construct
KTINGSGSPHSCGQNQQT

SEQ ID NO: 4137 - protein, 18 aa, synthetic construct
KTINGSGSPHSCLRNQQT

SEQ ID NO: 4138 - protein, 18 aa, synthetic construct
KTINGSGSPHSCLSNQQT

SEQ ID NO: 4139 - protein, 18 aa, synthetic construct
KTINGSGSPHSCRLNQQT

SEQ ID NO: 4140 - protein, 18 aa, synthetic construct
KTINGSGSPHSCSLNQQT

SEQ ID NO: 4141 - protein, 18 aa, synthetic construct
KTINGSGSPHSKACTLQT

SEQ ID NO: 4142 - protein, 18 aa, synthetic construct
KTINGSGSPHSKAFRAQT

SEQ ID NO: 4143 - protein, 18 aa, synthetic construct
KTINGSGSPHSKAIRKQT

SEQ ID NO: 4144 - protein, 18 aa, synthetic construct
KTINGSGSPHSKAQASRT

SEQ ID NO: 4145 - protein, 18 aa, synthetic construct
KTINGSGSPHSKAQFELT

SEQ ID NO: 4146 - protein, 18 aa, synthetic construct
KTINGSGSPHSKAQIVIT

SEQ ID NO: 4147 - protein, 18 aa, synthetic construct
KTINGSGSPHSKAQLART

SEQ ID NO: 4148 - protein, 18 aa, synthetic construct
KTINGSGSPHSKAQLQRT

SEQ ID NO: 4149 - protein, 18 aa, synthetic construct
KTINGSGSPHSKAQNARR

SEQ ID NO: 4150 - protein, 18 aa, synthetic construct
KTINGSGSPHSKAQNCPR

SEQ ID NO: 4151 - protein, 18 aa, synthetic construct
KTINGSGSPHSKAQNMRR

SEQ ID NO: 4152 - protein, 18 aa, synthetic construct
KTINGSGSPHSKAQNRRV

SEQ ID NO: 4153 - protein, 18 aa, synthetic construct
KTINGSGSPHSKAQPSRT

SEQ ID NO: 4154 - protein, 18 aa, synthetic construct
KTINGSGSPHSKAQQVKT

SEQ ID NO: 4155 - protein, 18 aa, synthetic construct
KTINGSGSPHSKAQQVRT

SEQ ID NO: 4156 - protein, 18 aa, synthetic construct
KTINGSGSPHSKAQRLKT

SEQ ID NO: 4157 - protein, 18 aa, synthetic construct
KTINGSGSPHSKAQRRAT

SEQ ID NO: 4158 - protein, 18 aa, synthetic construct
KTINGSGSPHSKAQRRGT

SEQ ID NO: 4159 - protein, 18 aa, synthetic construct
KTINGSGSPHSKAQRRRT

SEQ ID NO: 4160 - protein, 18 aa, synthetic construct
KTINGSGSPHSKAQRTRT

SEQ ID NO: 4161 - protein, 18 aa, synthetic construct
KTINGSGSPHSKAQRVHT

SEQ ID NO: 4162 - protein, 18 aa, synthetic construct
KTINGSGSPHSKAQTYRT

SEQ ID NO: 4163 - protein, 18 aa, synthetic construct
KTINGSGSPHSKAQVRKT

SEQ ID NO: 4164 - protein, 18 aa, synthetic construct
KTINGSGSPHSKARGRQT

SEQ ID NO: 4165 - protein, 18 aa, synthetic construct
KTINGSGSPHSKARLCQT

SEQ ID NO: 4166 - protein, 18 aa, synthetic construct
KTINGSGSPHSKARLKQT

SEQ ID NO: 4167 - protein, 18 aa, synthetic construct
KTINGSGSPHSKARNSQT

SEQ ID NO: 4168 - protein, 18 aa, synthetic construct
KTINGSGSPHSKARWVQT

SEQ ID NO: 4169 - protein, 18 aa, synthetic construct
KTINGSGSPHSKAVRWQT

SEQ ID NO: 4170 - protein, 18 aa, synthetic construct
KTINGSGSPHSKAYTRQT

SEQ ID NO: 4171 - protein, 18 aa, synthetic construct
KTINGSGSPHSKCQSQQT

SEQ ID NO: 4172 - protein, 18 aa, synthetic construct
KTINGSGSPHSKFLRQQT

SEQ ID NO: 4173 - protein, 18 aa, synthetic construct
KTINGSGSPHSKFRFQQT

SEQ ID NO: 4174 - protein, 18 aa, synthetic construct
KTINGSGSPHSKFRLQQT

SEQ ID NO: 4175 - protein, 18 aa, synthetic construct
KTINGSGSPHSKFRRQQT

SEQ ID NO: 4176 - protein, 18 aa, synthetic construct
KTINGSGSPHSKGMKQQT

SEQ ID NO: 4177 - protein, 18 aa, synthetic construct
KTINGSGSPHSKKLRQQT

SEQ ID NO: 4178 - protein, 18 aa, synthetic construct
KTINGSGSPHSKKRPQQT

SEQ ID NO: 4179 - protein, 18 aa, synthetic construct
KTINGSGSPHSKKSRQQT

SEQ ID NO: 4180 - protein, 18 aa, synthetic construct
KTINGSGSPHSKLYRQQT

SEQ ID NO: 4181 - protein, 18 aa, synthetic construct
KTINGSGSPHSKLYWQQT

SEQ ID NO: 4182 - protein, 18 aa, synthetic construct
KTINGSGSPHSKPRMQQT

SEQ ID NO: 4183 - protein, 18 aa, synthetic construct
KTINGSGSPHSKRFPQQT

SEQ ID NO: 4184 - protein, 18 aa, synthetic construct
KTINGSGSPHSKRFRQQT

SEQ ID NO: 4185 - protein, 18 aa, synthetic construct
KTINGSGSPHSKRPYQQT

SEQ ID NO: 4186 - protein, 18 aa, synthetic construct
KTINGSGSPHSKRRMQQT

SEQ ID NO: 4187 - protein, 18 aa, synthetic construct
KTINGSGSPHSKRSKQQT

SEQ ID NO: 4188 - protein, 18 aa, synthetic construct
KTINGSGSPHSKRSRQQT

SEQ ID NO: 4189 - protein, 18 aa, synthetic construct
KTINGSGSPHSKRTMQQT

SEQ ID NO: 4190 - protein, 18 aa, synthetic construct
KTINGSGSPHSKRTRQQT

SEQ ID NO: 4191 - protein, 18 aa, synthetic construct
KTINGSGSPHSKRVRQQT

SEQ ID NO: 4192 - protein, 18 aa, synthetic construct
KTINGSGSPHSKRYIQQT

SEQ ID NO: 4193 - protein, 18 aa, synthetic construct
KTINGSGSPHSKRYNQQT

SEQ ID NO: 4194 - protein, 18 aa, synthetic construct
KTINGSGSPHSKRYPQQT

SEQ ID NO: 4195 - protein, 18 aa, synthetic construct
KTINGSGSPHSKRYSQQT

SEQ ID NO: 4196 - protein, 18 aa, synthetic construct
KTINGSGSPHSKTCIQQT

SEQ ID NO: 4197 - protein, 18 aa, synthetic construct
KTINGSGSPHSKWLTQQT

SEQ ID NO: 4198 - protein, 18 aa, synthetic construct
KTINGSGSPHSKWVVQQT

SEQ ID NO: 4199 - protein, 18 aa, synthetic construct
KTINGSGSPHSKYRLQQT

SEQ ID NO: 4200 - protein, 18 aa, synthetic construct
KTINGSGSPHSKYSKQQT

SEQ ID NO: 4201 - protein, 18 aa, synthetic construct
KTINGSGSPHSKYSRQQT

SEQ ID NO: 4202 - protein, 18 aa, synthetic construct
KTINGSGSPHSLKRNQQT

SEQ ID NO: 4203 - protein, 18 aa, synthetic construct
KTINGSGSPHSLWFNQQT

SEQ ID NO: 4204 - protein, 18 aa, synthetic construct
KTINGSGSPHSLWPNQQT

SEQ ID NO: 4205 - protein, 18 aa, synthetic construct
KTINGSGSPHSLWTNQQT

SEQ ID NO: 4206 - protein, 18 aa, synthetic construct
KTINGSGSPHSMRRNQQT

SEQ ID NO: 4207 - protein, 18 aa, synthetic construct
KTINGSGSPHSPCLNQQT

SEQ ID NO: 4208 - protein, 18 aa, synthetic construct
KTINGSGSPHSQWQNQQT

SEQ ID NO: 4209 - protein, 18 aa, synthetic construct
KTINGSGSPHSRCANQQT

SEQ ID NO: 4210 - protein, 18 aa, synthetic construct
KTINGSGSPHSRIRNQQT

SEQ ID NO: 4211 - protein, 18 aa, synthetic construct
KTINGSGSPHSRKSNQQT

SEQ ID NO: 4212 - protein, 18 aa, synthetic construct
KTINGSGSPHSRLWNQQT

SEQ ID NO: 4213 - protein, 18 aa, synthetic construct
KTINGSGSPHSRRFNQQT

SEQ ID NO: 4214 - protein, 18 aa, synthetic construct
KTINGSGSPHSRRPNQQT

SEQ ID NO: 4215 - protein, 18 aa, synthetic construct
KTINGSGSPHSRSCNQQT

SEQ ID NO: 4216 - protein, 18 aa, synthetic construct
KTINGSGSPHSRSKNQQT

SEQ ID NO: 4217 - protein, 18 aa, synthetic construct
KTINGSGSPHSRTKNQQT

SEQ ID NO: 4218 - protein, 18 aa, synthetic construct
KTINGSGSPHSRWLNQQT

SEQ ID NO: 4219 - protein, 18 aa, synthetic construct
KTINGSGSPHSSVCNQQT

SEQ ID NO: 4220 - protein, 18 aa, synthetic construct
KTINGSGSPHSSWRNQQT

SEQ ID NO: 4221 - protein, 18 aa, synthetic construct
KTINGSGSPHSVCQNQQT

SEQ ID NO: 4222 - protein, 18 aa, synthetic construct
KTINGSGSPHSVLCNQQT

SEQ ID NO: 4223 - protein, 18 aa, synthetic construct
KTINGSGSPHSVRRNQQT

SEQ ID NO: 4224 - protein, 18 aa, synthetic construct
KTINGSGSPHSVSCNQQT

SEQ ID NO: 4225 - protein, 18 aa, synthetic construct
KTINGSGSPHSWALNQQT

SEQ ID NO: 4226 - protein, 18 aa, synthetic construct
KTINGSGSPHSWITNQQT

SEQ ID NO: 4227 - protein, 18 aa, synthetic construct
KTINGSGSPHSWPMNQQT

SEQ ID NO: 4228 - protein, 18 aa, synthetic construct
KTINGSGSPHSWRSNQQT

SEQ ID NO: 4229 - protein, 18 aa, synthetic construct
KTINGSGSPHSYFLNQQT

SEQ ID NO: 4230 - protein, 18 aa, synthetic construct
KTINGSGSPHSYTYNQQT

SEQ ID NO: 4231 - protein, 18 aa, synthetic construct
KTINGSGSPHSYWQNQQT

SEQ ID NO: 4232 - protein, 18 aa, synthetic construct
KTINGSGSPHTLCQNQQT

SEQ ID NO: 4233 - protein, 18 aa, synthetic construct
KTINGSGSPHWLRQNQQT

SEQ ID NO: 4234 - protein, 18 aa, synthetic construct
KTINGSGSPHWPSQNQQT

SEQ ID NO: 4235 - protein, 18 aa, synthetic construct
KTINGSGSPHYLRQNQQT

SEQ ID NO: 4236 - protein, 18 aa, synthetic construct
KTINGSGSPHYTRQNQQT

SEQ ID NO: 4237 - protein, 18 aa, synthetic construct
KTINGSLSPHLWAQNQQT

SEQ ID NO: 4238 - protein, 18 aa, synthetic construct
KTINGSPSPHCQAQNQQT

SEQ ID NO: 4239 - protein, 18 aa, synthetic construct
KTINGSRSPHLCAQNQQT

SEQ ID NO: 4240 - protein, 18 aa, synthetic construct
KTINGSRSPHWRAQNQQT

SEQ ID NO: 4241 - protein, 18 aa, synthetic construct
KTINGSVSPHWLAQNQQT

SEQ ID NO: 4242 - protein, 18 aa, synthetic construct
KTINGTFSPHRKAQNQQT

SEQ ID NO: 4243 - protein, 18 aa, synthetic construct
KTINGWTSPHRKAQNQQT

SEQ ID NO: 4244 - protein, 18 aa, synthetic construct
KTINRGISPHSKAQNQQT

SEQ ID NO: 4245 - protein, 18 aa, synthetic construct
KTINTVRSPHSKAQNQQT

SEQ ID NO: 4246 - protein, 18 aa, synthetic construct
KTKLRSGSPHSKAQNQQT

SEQ ID NO: 4247 - protein, 18 aa, synthetic construct
KTRLRSGSPHSKAQNQQT

SEQ ID NO: 4248 - protein, 18 aa, synthetic construct
KWLLGSGSPHSKAQNQQT

SEQ ID NO: 4249 - protein, 18 aa, synthetic construct
KWSQGSGSPHSKAQNQQT

SEQ ID NO: 4250 - protein, 18 aa, synthetic construct
KWYLGSGSPHSKAQNQQT

SEQ ID NO: 4251 - protein, 18 aa, synthetic construct
KYHSGSGSPHSKAQNQQT

SEQ ID NO: 4252 - protein, 18 aa, synthetic construct
KYLPGSGSPHSKAQNQQT

SEQ ID NO: 4253 - protein, 18 aa, synthetic construct
KAINGGGSPHSKTQNQQT

SEQ ID NO: 4254 - protein, 18 aa, synthetic construct
KAINGHDSPHKRSPNQQT

SEQ ID NO: 4255 - protein, 18 aa, synthetic construct
KAINGHDSPHKSFSPQQT

SEQ ID NO: 4256 - protein, 18 aa, synthetic construct
KAINGHDSPHKSGENQQP

SEQ ID NO: 4257 - protein, 18 aa, synthetic construct
KAINGHDSPHKSGQLART

SEQ ID NO: 4258 - protein, 18 aa, synthetic construct
KAINGHDSPHKSGQNAFL

SEQ ID NO: 4259 - protein, 18 aa, synthetic construct
KAINGHDSPHKSGQNAYT

SEQ ID NO: 4260 - protein, 18 aa, synthetic construct
KAINGHDSPHKSGQNFAS

SEQ ID NO: 4261 - protein, 18 aa, synthetic construct
KAINGHDSPHKSGQNLAS

SEQ ID NO: 4262 - protein, 18 aa, synthetic construct
KAINGHDSPHKSGQNLGS

SEQ ID NO: 4263 - protein, 18 aa, synthetic construct
KAINGHDSPHKSGQNLKF

SEQ ID NO: 4264 - protein, 18 aa, synthetic construct
KAINGHDSPHKSGQNLLK

SEQ ID NO: 4265 - protein, 18 aa, synthetic construct
KAINGHDSPHKSGQNLSR

SEQ ID NO: 4266 - protein, 18 aa, synthetic construct
KAINGHDSPHKSGQNLSS

SEQ ID NO: 4267 - protein, 18 aa, synthetic construct
KAINGHDSPHKSGQNSLG

SEQ ID NO: 4268 - protein, 18 aa, synthetic construct
KAINGHDSPHKSGQNTLQ

SEQ ID NO: 4269 - protein, 18 aa, synthetic construct
KAINGHDSPHKSGQNTSL

SEQ ID NO: 4270 - protein, 18 aa, synthetic construct
KAINGHDSPHKSGQRLGT

SEQ ID NO: 4271 - protein, 18 aa, synthetic construct
KAINGHDSPHKSGQRNYT

SEQ ID NO: 4272 - protein, 18 aa, synthetic construct
KAINGHDSPHKSGQRPST

SEQ ID NO: 4273 - protein, 18 aa, synthetic construct
KAINGHDSPHKSGQRPVT

SEQ ID NO: 4274 - protein, 18 aa, synthetic construct
KAINGHDSPHKSGQVPST

SEQ ID NO: 4275 - protein, 18 aa, synthetic construct
KAINGHDSPHKSLSNQQT

SEQ ID NO: 4276 - protein, 18 aa, synthetic construct
KAINGHDSPHKSVLSQQT

SEQ ID NO: 4277 - protein, 18 aa, synthetic construct
KAINGHDSPHKTLQNQQT

SEQ ID NO: 4278 - protein, 18 aa, synthetic construct
KAINGHNSPHSKAQNQQT

SEQ ID NO: 4279 - protein, 18 aa, synthetic construct
KAINGLDSPHSKAQNQQT

SEQ ID NO: 4280 - protein, 18 aa, synthetic construct
KAINGSGSPHKSGQNQQT

SEQ ID NO: 4281 - protein, 18 aa, synthetic construct
KAINGSGSPHSKAQGQQT

SEQ ID NO: 4282 - protein, 18 aa, synthetic construct
KAINGSGSPHSKAQLSGT

SEQ ID NO: 4283 - protein, 18 aa, synthetic construct
KAINGSGSPHSKAQNGSL

SEQ ID NO: 4284 - protein, 18 aa, synthetic construct
KAINGSGSPHSKAQNSLL

SEQ ID NO: 4285 - protein, 18 aa, synthetic construct
KAINGSGSPHSKAVGLQT

SEQ ID NO: 4286 - protein, 18 aa, synthetic construct
KAINGSGSPHSKSLLQQT

SEQ ID NO: 4287 - protein, 18 aa, synthetic construct
KAINGSGSPHSKSLPQQT

SEQ ID NO: 4288 - protein, 18 aa, synthetic construct
KAINGSGSPHSKSTFQQT

SEQ ID NO: 4289 - protein, 18 aa, synthetic construct
KAITGHDSPHSKAQNQQT

SEQ ID NO: 4290 - protein, 18 aa, synthetic construct
KDVMGSGSPHSKAQNQQT

SEQ ID NO: 4291 - protein, 18 aa, synthetic construct
KEIVGSGSPHSKAQNQQT

SEQ ID NO: 4292 - protein, 18 aa, synthetic construct
KEIYGSGSPHSKAQNQQT

SEQ ID NO: 4293 - protein, 18 aa, synthetic construct
KELSGSGSPHSKAQNQQT

SEQ ID NO: 4294 - protein, 18 aa, synthetic construct
KETIGSGSPHSKAQNQQT

SEQ ID NO: 4295 - protein, 18 aa, synthetic construct
KEVLGSGSPHSKAQNQQT

SEQ ID NO: 4296 - protein, 18 aa, synthetic construct
KFALGHDSPHKSGQKQQT

SEQ ID NO: 4297 - protein, 18 aa, synthetic construct
KIINGHDSPHKSGQNLVL

SEQ ID NO: 4298 - protein, 18 aa, synthetic construct
KIINGHDSPHKSGQRNYT

SEQ ID NO: 4299 - protein, 18 aa, synthetic construct
KIINGHDSPHSKAQNQQT

SEQ ID NO: 4300 - protein, 18 aa, synthetic construct
KLNPGHDSPHKSGQTQQT

SEQ ID NO: 4301 - protein, 18 aa, synthetic construct
KLNRGHDSPHKSGQNQQS

SEQ ID NO: 4302 - protein, 18 aa, synthetic construct
KLSSGHDSPHKSGQNQQN

SEQ ID NO: 4303 - protein, 18 aa, synthetic construct
KNINGHDSPHSKAQNQQT

SEQ ID NO: 4304 - protein, 18 aa, synthetic construct
KNNDGSGSPHSKAQNQQT

SEQ ID NO: 4305 - protein, 18 aa, synthetic construct
KNVMGSGSPHSKAQNQQT

SEQ ID NO: 4306 - protein, 18 aa, synthetic construct
KPINGHDSPHKSGQNKLS

SEQ ID NO: 4307 - protein, 18 aa, synthetic construct
KPINGHDSPHKSGQNLSS

SEQ ID NO: 4308 - protein, 18 aa, synthetic construct
KPINGHDSPHSKAQNQQT

SEQ ID NO: 4309 - protein, 18 aa, synthetic construct
KRINGHDSPHSKAQNQQT

SEQ ID NO: 4310 - protein, 18 aa, synthetic construct
KSCSGHDSPHKSGQNQQS

SEQ ID NO: 4311 - protein, 18 aa, synthetic construct
KSINGHDSPHKSGQNLAS

SEQ ID NO: 4312 - protein, 18 aa, synthetic construct
KSINGHDSPHKSGQNLFL

SEQ ID NO: 4313 - protein, 18 aa, synthetic construct
KSINGHDSPHKSGQNLLM

SEQ ID NO: 4314 - protein, 18 aa, synthetic construct
KSINGHDSPHKSGQNLLQ

SEQ ID NO: 4315 - protein, 18 aa, synthetic construct
KSINGHDSPHKSGQNSLG

SEQ ID NO: 4316 - protein, 18 aa, synthetic construct
KSINGHDSPHKSGQNTLQ

SEQ ID NO: 4317 - protein, 18 aa, synthetic construct
KSINGHDSPHKSSSNQQT

SEQ ID NO: 4318 - protein, 18 aa, synthetic construct
KSINGHDSPHKYKLNQQT

SEQ ID NO: 4319 - protein, 18 aa, synthetic construct
KSINGSGSPHKSGQKQQT

SEQ ID NO: 4320 - protein, 18 aa, synthetic construct
KSINGSGSPHKSGQNQQT

SEQ ID NO: 4321 - protein, 18 aa, synthetic construct
KSINGSGSPHSKAQGLST

SEQ ID NO: 4322 - protein, 18 aa, synthetic construct
KSINGSGSPHSKAQLLGT

SEQ ID NO: 4323 - protein, 18 aa, synthetic construct
KSINGSGSPHSKTSWQQT

SEQ ID NO: 4324 - protein, 18 aa, synthetic construct
KSMNGHDSPHSKAQNQQT

SEQ ID NO: 4325 - protein, 18 aa, synthetic construct
KSTLGSGSPHSKAQNQHT

SEQ ID NO: 4326 - protein, 18 aa, synthetic construct
KSTLGSGSPHSKAQNQQN

SEQ ID NO: 4327 - protein, 18 aa, synthetic construct
KSTVGSGSPHSKAQTQQT

SEQ ID NO: 4328 - protein, 18 aa, synthetic construct
KTCKESGSPHSKAQNQQT

SEQ ID NO: 4329 - protein, 18 aa, synthetic construct
KTCKGSGSPHSKAQNQQT

SEQ ID NO: 4330 - protein, 18 aa, synthetic construct
KTCKSSGSPHSKAQNQQT

SEQ ID NO: 4331 - protein, 18 aa, synthetic construct
KTDMGSGSPHSKAQNQQT

SEQ ID NO: 4332 - protein, 18 aa, synthetic construct
KTDNGIGSPHSKAQNQQT

SEQ ID NO: 4333 - protein, 18 aa, synthetic construct
KTEGGSGSPHSKAQNQQT

SEQ ID NO: 4334 - protein, 18 aa, synthetic construct
KTEHHSGSPHSKAQNQQT

SEQ ID NO: 4335 - protein, 18 aa, synthetic construct
KTEKDSGSPHSKAQNQQT

SEQ ID NO: 4336 - protein, 18 aa, synthetic construct
KTELGHDSPHKRGQNQQT

SEQ ID NO: 4337 - protein, 18 aa, synthetic construct
KTESVSGSPHSKAQNQQT

SEQ ID NO: 4338 - protein, 18 aa, synthetic construct
KTETNSGSPHSKAQNQQT

SEQ ID NO: 4339 - protein, 18 aa, synthetic construct
KTETYSGSPHSKAQNQQT

SEQ ID NO: 4340 - protein, 18 aa, synthetic construct
KTEWLSGSPHSKAQNQQT

SEQ ID NO: 4341 - protein, 18 aa, synthetic construct
KTFNGSGSPHKSGQNQQT

SEQ ID NO: 4342 - protein, 18 aa, synthetic construct
KTGLRHDSPHKSGQKQQT

SEQ ID NO: 4343 - protein, 18 aa, synthetic construct
KTGLRHDSPHKSGQNQQS

SEQ ID NO: 4344 - protein, 18 aa, synthetic construct
KTGVTHDSPHKSGQKQQT

SEQ ID NO: 4345 - protein, 18 aa, synthetic construct
KTIDGHESPHSKAQNQQT

SEQ ID NO: 4346 - protein, 18 aa, synthetic construct
KTIEGHDSPHKSGQTQQT

SEQ ID NO: 4347 - protein, 18 aa, synthetic construct
KTIHGHDSPHSKAQNQQT

SEQ ID NO: 4348 - protein, 18 aa, synthetic construct
KTIHGHESPHSKAQNQQT

SEQ ID NO: 4349 - protein, 18 aa, synthetic construct
KTIIGHDSPHKSGQNRSS

SEQ ID NO: 4350 - protein, 18 aa, synthetic construct
KTIIGHDSPHKSGQRLGT

SEQ ID NO: 4351 - protein, 18 aa, synthetic construct
KTIIGSGSPHKSGQNQQT

SEQ ID NO: 4352 - protein, 18 aa, synthetic construct
KTIKGHDSPHKSGQNMLF

SEQ ID NO: 4353 - protein, 18 aa, synthetic construct
KTILGSGSPHSKAQNLQT

SEQ ID NO: 4354 - protein, 18 aa, synthetic construct
KTINGCSSPHWKAQNQQT

SEQ ID NO: 4355 - protein, 18 aa, synthetic construct
KTINGGGSTHSKAQNQQT

SEQ ID NO: 4356 - protein, 18 aa, synthetic construct
KTINGHDSPHKAGQSQQT

SEQ ID NO: 4357 - protein, 18 aa, synthetic construct
KTINGHDSPHKRGQNVPS

SEQ ID NO: 4358 - protein, 18 aa, synthetic construct
KTINGHDSPHKRGRSYQT

SEQ ID NO: 4359 - protein, 18 aa, synthetic construct
KTINGHDSPHKTGQNPPT

SEQ ID NO: 4360 - protein, 18 aa, synthetic construct
KTINGHDSPHSKAENQQT

SEQ ID NO: 4361 - protein, 18 aa, synthetic construct
KTINGHDSPHSKALSLQT

SEQ ID NO: 4362 - protein, 18 aa, synthetic construct
KTINGHDSPHSKAQGQQT

SEQ ID NO: 4363 - protein, 18 aa, synthetic construct
KTINGHDSPHSKAQHQQT

SEQ ID NO: 4364 - protein, 18 aa, synthetic construct
KTINGHDSPHSKAQIQQT

SEQ ID NO: 4365 - protein, 18 aa, synthetic construct
KTINGHDSPHSKAQKQQT

SEQ ID NO: 4366 - protein, 18 aa, synthetic construct
KTINGHDSPHSKAQNLSS

SEQ ID NO: 4367 - protein, 18 aa, synthetic construct
KTINGHDSPHSKAQNPQT

SEQ ID NO: 4368 - protein, 18 aa, synthetic construct
KTINGHDSPHSKAQNQET

SEQ ID NO: 4369 - protein, 18 aa, synthetic construct
KTINGHDSPHSKAQNQHT

SEQ ID NO: 4370 - protein, 18 aa, synthetic construct
KTINGHDSPHSKAQNQLT

SEQ ID NO: 4371 - protein, 18 aa, synthetic construct
KTINGHDSPHSKAQNQPT

SEQ ID NO: 4372 - protein, 18 aa, synthetic construct
KTINGHDSPHSKAQNQQA

SEQ ID NO: 4373 - protein, 18 aa, synthetic construct
KTINGHDSPHSKAQNTGS

SEQ ID NO: 4374 - protein, 18 aa, synthetic construct
KTINGHDSPHSKAQSQQT

SEQ ID NO: 4375 - protein, 18 aa, synthetic construct
KTINGHDSPHSKAQTQQT

SEQ ID NO: 4376 - protein, 18 aa, synthetic construct
KTINGHDSPHSKAQYQQT

SEQ ID NO: 4377 - protein, 18 aa, synthetic construct
KTINGHDSPHSKARNQQT

SEQ ID NO: 4378 - protein, 18 aa, synthetic construct
KTINGHDSPHSKLPGQQT

SEQ ID NO: 4379 - protein, 18 aa, synthetic construct
KTINGHDSPHSKSPNQQT

SEQ ID NO: 4380 - protein, 18 aa, synthetic construct
KTINGHESPHKSGQNAFL

SEQ ID NO: 4381 - protein, 18 aa, synthetic construct
KTINGIGSPHSKAPNEQT

SEQ ID NO: 4382 - protein, 18 aa, synthetic construct
KTINGQDSPHKSGQNLHM

SEQ ID NO: 4383 - protein, 18 aa, synthetic construct
KTINGRGSPHSKAQIGMT

SEQ ID NO: 4384 - protein, 18 aa, synthetic construct
KTINGRGSPHSKAQNQVL

SEQ ID NO: 4385 - protein, 18 aa, synthetic construct
KTINGRGSPHSKAQSPTT

SEQ ID NO: 4386 - protein, 18 aa, synthetic construct
KTINGRGSPHSKATSFQT

SEQ ID NO: 4387 - protein, 18 aa, synthetic construct
KTINGSGSPHFVVQNQQT

SEQ ID NO: 4388 - protein, 18 aa, synthetic construct
KTINGSGSPHKRGQKQQT

SEQ ID NO: 4389 - protein, 18 aa, synthetic construct
KTINGSGSPHKRGQNQET

SEQ ID NO: 4390 - protein, 18 aa, synthetic construct
KTINGSGSPHKRGQNQLT

SEQ ID NO: 4391 - protein, 18 aa, synthetic construct
KTINGSGSPHKRGRNQQT

SEQ ID NO: 4392 - protein, 18 aa, synthetic construct
KTINGSGSPHKSGGNQQT

SEQ ID NO: 4393 - protein, 18 aa, synthetic construct
KTINGSGSPHKSGHNQET

SEQ ID NO: 4394 - protein, 18 aa, synthetic construct
KTINGSGSPHKSGHNQLT

SEQ ID NO: 4395 - protein, 18 aa, synthetic construct
KTINGSGSPHKSGHNQQN

SEQ ID NO: 4396 - protein, 18 aa, synthetic construct
KTINGSGSPHKSGLNQLT

SEQ ID NO: 4397 - protein, 18 aa, synthetic construct
KTINGSGSPHKSGPNQQT

SEQ ID NO: 4398 - protein, 18 aa, synthetic construct
KTINGSGSPHKSGQGQQT

SEQ ID NO: 4399 - protein, 18 aa, synthetic construct
KTINGSGSPHKSGQHLQT

SEQ ID NO: 4400 - protein, 18 aa, synthetic construct
KTINGSGSPHKSGQHQQT

SEQ ID NO: 4401 - protein, 18 aa, synthetic construct
KTINGSGSPHKSGQKHQT

SEQ ID NO: 4402 - protein, 18 aa, synthetic construct
KTINGSGSPHKSGQKQQS

SEQ ID NO: 4403 - protein, 18 aa, synthetic construct
KTINGSGSPHKSGQNEQT

SEQ ID NO: 4404 - protein, 18 aa, synthetic construct
KTINGSGSPHKSGQNHQT

SEQ ID NO: 4405 - protein, 18 aa, synthetic construct
KTINGSGSPHKSGQNKQT

SEQ ID NO: 4406 - protein, 18 aa, synthetic construct
KTINGSGSPHKSGQNKTS

SEQ ID NO: 4407 - protein, 18 aa, synthetic construct
KTINGSGSPHKSGQNQEA

SEQ ID NO: 4408 - protein, 18 aa, synthetic construct
KTINGSGSPHKSGQNQET

SEQ ID NO: 4409 - protein, 18 aa, synthetic construct
KTINGSGSPHKSGQNQKT

SEQ ID NO: 4410 - protein, 18 aa, synthetic construct
KTINGSGSPHKSGQNQQI

SEQ ID NO: 4411 - protein, 18 aa, synthetic construct
KTINGSGSPHKSGQNQQR

SEQ ID NO: 4412 - protein, 18 aa, synthetic construct
KTINGSGSPHKSGQNQRT

SEQ ID NO: 4413 - protein, 18 aa, synthetic construct
KTINGSGSPHKSGQNQYT

SEQ ID NO: 4414 - protein, 18 aa, synthetic construct
KTINGSGSPHKSGQRQQT

SEQ ID NO: 4415 - protein, 18 aa, synthetic construct
KTINGSGSPHKSGQSQQT

SEQ ID NO: 4416 - protein, 18 aa, synthetic construct
KTINGSGSPHKSGQYQRT

SEQ ID NO: 4417 - protein, 18 aa, synthetic construct
KTINGSGSPHKSGRNQQA

SEQ ID NO: 4418 - protein, 18 aa, synthetic construct
KTINGSGSPHKSRHNQQT

SEQ ID NO: 4419 - protein, 18 aa, synthetic construct
KTINGSGSPHKSRQYQQT

SEQ ID NO: 4420 - protein, 18 aa, synthetic construct
KTINGSGSPHRKAQAPGT

SEQ ID NO: 4421 - protein, 18 aa, synthetic construct
KTINGSGSPHSKAAMKQT

SEQ ID NO: 4422 - protein, 18 aa, synthetic construct
KTINGSGSPHSKAGRQQT

SEQ ID NO: 4423 - protein, 18 aa, synthetic construct
KTINGSGSPHSKAGRTQT

SEQ ID NO: 4424 - protein, 18 aa, synthetic construct
KTINGSGSPHSKAKSNQT

SEQ ID NO: 4425 - protein, 18 aa, synthetic construct
KTINGSGSPHSKALKTQT

SEQ ID NO: 4426 - protein, 18 aa, synthetic construct
KTINGSGSPHSKAPRTQT

SEQ ID NO: 4427 - protein, 18 aa, synthetic construct
KTINGSGSPHSKAQAART

SEQ ID NO: 4428 - protein, 18 aa, synthetic construct
KTINGSGSPHSKAQAILT

SEQ ID NO: 4429 - protein, 18 aa, synthetic construct
KTINGSGSPHSKAQCRGT

SEQ ID NO: 4430 - protein, 18 aa, synthetic construct
KTINGSGSPHSKAQGLRT

SEQ ID NO: 4431 - protein, 18 aa, synthetic construct
KTINGSGSPHSKAQKGVL

SEQ ID NO: 4432 - protein, 18 aa, synthetic construct
KTINGSGSPHSKAQKSNT

SEQ ID NO: 4433 - protein, 18 aa, synthetic construct
KTINGSGSPHSKAQNNKF

SEQ ID NO: 4434 - protein, 18 aa, synthetic construct
KTINGSGSPHSKAQNRRT

SEQ ID NO: 4435 - protein, 18 aa, synthetic construct
KTINGSGSPHSKAQPKQT

SEQ ID NO: 4436 - protein, 18 aa, synthetic construct
KTINGSGSPHSKAQRAPT

SEQ ID NO: 4437 - protein, 18 aa, synthetic construct
KTINGSGSPHSKAQREHT

SEQ ID NO: 4438 - protein, 18 aa, synthetic construct
KTINGSGSPHSKAQRFGT

SEQ ID NO: 4439 - protein, 18 aa, synthetic construct
KTINGSGSPHSKAQRPCT

SEQ ID NO: 4440 - protein, 18 aa, synthetic construct
KTINGSGSPHSKAQRQAT

SEQ ID NO: 4441 - protein, 18 aa, synthetic construct
KTINGSGSPHSKAQRQPT

SEQ ID NO: 4442 - protein, 18 aa, synthetic construct
KTINGSGSPHSKAQTKLT

SEQ ID NO: 4443 - protein, 18 aa, synthetic construct
KTINGSGSPHSKAQTTHT

SEQ ID NO: 4444 - protein, 18 aa, synthetic construct
KTINGSGSPHSKAQVQRT

SEQ ID NO: 4445 - protein, 18 aa, synthetic construct
KTINGSGSPHSKAQVVRT

SEQ ID NO: 4446 - protein, 18 aa, synthetic construct
KTINGSGSPHSKAQWPNT

SEQ ID NO: 4447 - protein, 18 aa, synthetic construct
KTINGSGSPHSKAQYPST

SEQ ID NO: 4448 - protein, 18 aa, synthetic construct
KTINGSGSPHSKARALQT

SEQ ID NO: 4449 - protein, 18 aa, synthetic construct
KTINGSGSPHSKARDQHT

SEQ ID NO: 4450 - protein, 18 aa, synthetic construct
KTINGSGSPHSKARFQQT

SEQ ID NO: 4451 - protein, 18 aa, synthetic construct
KTINGSGSPHSKARRTQT

SEQ ID NO: 4452 - protein, 18 aa, synthetic construct
KTINGSGSPHSKARSLQT

SEQ ID NO: 4453 - protein, 18 aa, synthetic construct
KTINGSGSPHSKARVIQT

SEQ ID NO: 4454 - protein, 18 aa, synthetic construct
KTINGSGSPHSKAWYLQT

SEQ ID NO: 4455 - protein, 18 aa, synthetic construct
KTINGSGSPHSKGGGQQT

SEQ ID NO: 4456 - protein, 18 aa, synthetic construct
KTINGSGSPHSKGSRQQT

SEQ ID NO: 4457 - protein, 18 aa, synthetic construct
KTINGSGSPHSKLQRQQT

SEQ ID NO: 4458 - protein, 18 aa, synthetic construct
KTINGSGSPHSKMLRQQT

SEQ ID NO: 4459 - protein, 18 aa, synthetic construct
KTINGSGSPHSKSSIKQT

SEQ ID NO: 4460 - protein, 18 aa, synthetic construct
KTINGSGSPHSKVRFQQT

SEQ ID NO: 4461 - protein, 18 aa, synthetic construct
KTINGSGSPHSVVWNQQT

SEQ ID NO: 4462 - protein, 18 aa, synthetic construct
KTINGSTSPHKLAQNQQP

SEQ ID NO: 4463 - protein, 18 aa, synthetic construct
KTINRHDSPHKSGQRPST

SEQ ID NO: 4464 - protein, 18 aa, synthetic construct
KTINRIMSPHSKAQNQQT

SEQ ID NO: 4465 - protein, 18 aa, synthetic construct
KTINTARSPHSKAQNQQT

SEQ ID NO: 4466 - protein, 18 aa, synthetic construct
KTISGHDSPHSKAQNQQT

SEQ ID NO: 4467 - protein, 18 aa, synthetic construct
KTISGSGSPHKSGQNQQT

SEQ ID NO: 4468 - protein, 18 aa, synthetic construct
KTITGHDSPHKSGQRLGT

SEQ ID NO: 4469 - protein, 18 aa, synthetic construct
KTITGSGSPHKSGQNQQT

SEQ ID NO: 4470 - protein, 18 aa, synthetic construct
KTIYGHDSPHKSGQRLGT

SEQ ID NO: 4471 - protein, 18 aa, synthetic construct
KTLNGHDSPHKSGQNLFL

SEQ ID NO: 4472 - protein, 18 aa, synthetic construct
KTLNGHDSPHKSGQNLSS

SEQ ID NO: 4473 - protein, 18 aa, synthetic construct
KTLSFHDSPHKSGQNQQS

SEQ ID NO: 4474 - protein, 18 aa, synthetic construct
KTSNGSGSPHSKAQNTMT

SEQ ID NO: 4475 - protein, 18 aa, synthetic construct
KTTNGHDSPHSKAQNQQT

SEQ ID NO: 4476 - protein, 18 aa, synthetic construct
KTVNGGGSPHSKAQNQQT

SEQ ID NO: 4477 - protein, 18 aa, synthetic construct
KTVNGHDSPHKSGQNVSL

SEQ ID NO: 4478 - protein, 18 aa, synthetic construct
KTVNGHDSPHKSGQRPST

SEQ ID NO: 4479 - protein, 18 aa, synthetic construct
KTVNGHDSPHKSGQTQQA

SEQ ID NO: 4480 - protein, 18 aa, synthetic construct
KTVNGHESPHSKAQNQQT

SEQ ID NO: 4481 - protein, 18 aa, synthetic construct
KTVNGSGSPHSKAQGLST

SEQ ID NO: 4482 - protein, 18 aa, synthetic construct
KTVNGSGSPHSKAQNVTS

SEQ ID NO: 4483 - protein, 18 aa, synthetic construct
KTVPASGSPHSKAQNQQT

SEQ ID NO: 4484 - protein, 18 aa, synthetic construct
NTINGSGSPHSKAHNQQT

SEQ ID NO: 4485 - protein, 18 aa, synthetic construct
TTINGGGSPHSKAQNQQT

SEQ ID NO: 4486 - protein, 8 aa, synthetic construct
HDSPHSKA

SEQ ID NO: 4487 - protein, 9 aa, synthetic construct
NGSGQNQQT

SEQ ID NO: 4488-4672 - skipped (185 entries)

SEQ ID NO: 4673 - DNA, 23 bp, synthetic construct
  source 1..23: mol_type = other DNA
acaaacaccattgtcacactcca

SEQ ID NO: 4674 - DNA, 71 bp, synthetic construct
  source 1..71: mol_type = other DNA
acaaacaccattgtcacactccacacaaacaccattgtcacactccacacaaacaccattgtcacactcca

SEQ ID NO: 4675 - DNA, 23 bp, synthetic construct
  source 1..23: mol_type = other DNA
tccataaagtaggaaacactaca

SEQ ID NO: 4676 - DNA, 22 bp, synthetic construct
  source 1..22: mol_type = other DNA
agtgaattctaccagtgccata

SEQ ID NO: 4677 - DNA, 24 bp, synthetic construct
  source 1..24: mol_type = other DNA
agtgtgagttctaccattgccaaa

SEQ ID NO: 4678 - DNA, 23 bp, synthetic construct
  source 1..23: mol_type = other DNA
agcaaaaatgtgctagtgccaaa

SEQ ID NO: 4679 - DNA, 22 bp, synthetic construct
  source 1..22: mol_type = other DNA
atacatacttctttacattcca

SEQ ID NO: 4680 - protein, 7 aa, synthetic construct
TLAVPFK

SEQ ID NO: 4681 - protein, 18 aa, synthetic construct
KTINGSGSPHSKAQARKT

SEQ ID NO: 4682 - protein, 18 aa, synthetic construct
KYIVGSGSPHSKAQNQQT

SEQ ID NO: 4683 - protein, 18 aa, synthetic construct
KTINGSGSPHSMYMNQQT

SEQ ID NO: 4684 - protein, 18 aa, synthetic construct
KTINGSGSPHSKAFYRQT

SEQ ID NO: 4685 - protein, 18 aa, synthetic construct
KTINGSGSPHSKLKRQQT

SEQ ID NO: 4686 - protein, 18 aa, synthetic construct
KTINGSGSPHSKRHRQQT

SEQ ID NO: 4687 - protein, 18 aa, synthetic construct
KTINGSGSPHSKAQKCIT

SEQ ID NO: 4688 - protein, 18 aa, synthetic construct
KTINGSGSPHSKWRLQQT

SEQ ID NO: 4689 - protein, 18 aa, synthetic construct
KTINGSGSPHSRCRNQQT

SEQ ID NO: 4690 - protein, 18 aa, synthetic construct
KTINGSGSPHSFTCNQQT

SEQ ID NO: 4691 - protein, 18 aa, synthetic construct
KTINGSGSPHSKFFIQQT

SEQ ID NO: 4692 - protein, 18 aa, synthetic construct
KTINGSGSPHSKAQYSRT

SEQ ID NO: 4693 - protein, 18 aa, synthetic construct
KTINGSGSPHCALQNQQT

SEQ ID NO: 4694 - protein, 13 aa, synthetic construct
  VARIANT 7: note = S, C, F, or V
  VARIANT 8: note = K, L, R, I, E, Y, V, or S
  VARIANT 9: note = A, R, L, G, I, Y, S, F, or W
  VARIANT 10: note = W, Q, R, G, L, V, S, or F
  VARIANT 11: note = N, Y, R, C, K, or L
  VARIANT 12: note = Q, G, K, R, T, L, or Y
  VARIANT 13: note = Q, L, R, or V
GSGSPHXXXXXXX

SEQ ID NO: 4695 - protein, 6 aa, synthetic construct
GSGSPH

SEQ ID NO: 4696 - protein, 11 aa, synthetic construct
  VARIANT 7: note = S, I, F, V, C, Y, W, R, P, L, Q, M, K, or G
  VARIANT 8: note = K, M, R, F, V, C, P, Y, L, W, G, N, S, T, I, or A
  VARIANT 9: note = A, Y, L, R, W, C, T, F, H, I, P, M, K, S, V, G, Q, or N
  VARIANT 10: note = Q, M, F, K, H, R, C, W, P, V, L, G, S, Y, I, A, T, D, N, or E
  VARIANT 11: note = A, N, Y, R, K, L, I, M, Q, S, C, W, F, T, G, V, or P
GSGSPHXXXXX

SEQ ID NO: 4697 - protein, 9 aa, synthetic construct
GSGSPHSKA

SEQ ID NO: 4698 - protein, 9 aa, synthetic construct
GHDSPHKSG

SEQ ID NO: 4699 - protein, 12 aa, synthetic construct
  VARIANT 1: note = T, M, A, C, I, R, L, D, F, V, Q, N, or H
  VARIANT 2: note = I, P, E, N, D, S, A, T, M, or Q
  VARIANT 3: note = N, E, G, Y, W, M, T, I, K, Q, F, S, V, A, or L
  VARIANT 4: note = G, D, R, or E
  VARIANT 5: note = H, Q, N, or D
  VARIANT 6: note = D or R
XXXXXXSPHKSG

SEQ ID NO: 4700 - protein, 4 aa, synthetic construct
SPHS

SEQ ID NO: 4701 - protein, 5 aa, synthetic construct
SPHSK

SEQ ID NO: 4702 - protein, 4 aa, synthetic construct
HDSP

SEQ ID NO: 4703 - protein, 5 aa, synthetic construct
HDSPH

SEQ ID NO: 4704 - protein, 5 aa, synthetic construct
SPHKS

SEQ ID NO: 4705 - protein, 5 aa, synthetic construct
SPHAR

SEQ ID NO: 4706 - protein, 5 aa, synthetic construct
SPHVK

SEQ ID NO: 4707 - protein, 5 aa, synthetic construct
SPHAS

SEQ ID NO: 4708 - protein, 5 aa, synthetic construct
SPHKK

SEQ ID NO: 4709 - protein, 5 aa, synthetic construct
SPHVR

SEQ ID NO: 4710 - protein, 5 aa, synthetic construct
SPHRK

SEQ ID NO: 4711 - protein, 5 aa, synthetic construct
SPHKT

SEQ ID NO: 4712 - protein, 5 aa, synthetic construct
SPHKF

SEQ ID NO: 4713 - protein, 5 aa, synthetic construct
SPHKI

SEQ ID NO: 4714 - protein, 5 aa, synthetic construct
SPHKL

SEQ ID NO: 4715 - protein, 5 aa, synthetic construct
SPHKY

SEQ ID NO: 4716 - protein, 5 aa, synthetic construct
SPHTR

SEQ ID NO: 4717 - protein, 5 aa, synthetic construct
SPHKR

SEQ ID NO: 4718 - protein, 5 aa, synthetic construct
SPHGA

SEQ ID NO: 4719 - protein, 5 aa, synthetic construct
SPHSR

SEQ ID NO: 4720 - protein, 5 aa, synthetic construct
SPHSL

SEQ ID NO: 4721 - protein, 5 aa, synthetic construct
SPHSS

SEQ ID NO: 4722 - protein, 5 aa, synthetic construct
SPHFL

SEQ ID NO: 4723 - protein, 5 aa, synthetic construct
SPHWK

SEQ ID NO: 4724 - protein, 5 aa, synthetic construct
SPHGK

SEQ ID NO: 4725 - protein, 5 aa, synthetic construct
SPHTK

SEQ ID NO: 4726 - protein, 5 aa, synthetic construct
SPHNK

SEQ ID NO: 4727 - protein, 5 aa, synthetic construct
SPHAK

SEQ ID NO: 4728 - protein, 5 aa, synthetic construct
SPHKH

SEQ ID NO: 4729 - protein, 5 aa, synthetic construct
SPHKM

SEQ ID NO: 4730 - protein, 5 aa, synthetic construct
SPHRS

SEQ ID NO: 4731 - protein, 6 aa, synthetic construct
SPHSKT

SEQ ID NO: 4732 - protein, 6 aa, synthetic construct
SPHSKG

SEQ ID NO: 4733 - protein, 6 aa, synthetic construct
SPHGKA

SEQ ID NO: 4734 - protein, 6 aa, synthetic construct
SPHNKA

SEQ ID NO: 4735 - protein, 6 aa, synthetic construct
SPHSKN

SEQ ID NO: 4736 - protein, 6 aa, synthetic construct
SPHAKA

SEQ ID NO: 4737 - protein, 6 aa, synthetic construct
SPHSKV

SEQ ID NO: 4738 - protein, 6 aa, synthetic construct
SPHKTG

SEQ ID NO: 4739 - protein, 6 aa, synthetic construct
SPHTKA

SEQ ID NO: 4740 - protein, 6 aa, synthetic construct
SPHKSL

SEQ ID NO: 4741 - protein, 6 aa, synthetic construct
SPHKSE

SEQ ID NO: 4742 - protein, 6 aa, synthetic construct
SPHKSV

SEQ ID NO: 4743 - protein, 6 aa, synthetic construct
SPHKSW

SEQ ID NO: 4744 - protein, 6 aa, synthetic construct
SPHKSN

SEQ ID NO: 4745 - protein, 6 aa, synthetic construct
SPHKHG

SEQ ID NO: 4746 - protein, 6 aa, synthetic construct
SPHKSQ

SEQ ID NO: 4747 - protein, 6 aa, synthetic construct
SPHKSK

SEQ ID NO: 4748 - protein, 6 aa, synthetic construct
SPHKLW

SEQ ID NO: 4749 - protein, 6 aa, synthetic construct
SPHWKG

SEQ ID NO: 4750 - protein, 6 aa, synthetic construct
SPHKMG

SEQ ID NO: 4751 - protein, 6 aa, synthetic construct
SPHKMA

SEQ ID NO: 4752 - protein, 5 aa, synthetic construct
SGSPH

SEQ ID NO: 4753 - protein, 5 aa, synthetic construct
QDSPH

SEQ ID NO: 4754 - protein, 5 aa, synthetic construct
RGSPH

SEQ ID NO: 4755 - protein, 5 aa, synthetic construct
SHSPH

SEQ ID NO: 4756 - protein, 5 aa, synthetic construct
QSSPH

SEQ ID NO: 4757 - protein, 5 aa, synthetic construct
DDSPH

SEQ ID NO: 4758 - protein, 5 aa, synthetic construct
HESPH

SEQ ID NO: 4759 - protein, 5 aa, synthetic construct
NYSPH

SEQ ID NO: 4760 - protein, 5 aa, synthetic construct
VGSPH

SEQ ID NO: 4761 - protein, 5 aa, synthetic construct
SCSPH

SEQ ID NO: 4762 - protein, 5 aa, synthetic construct
LLSPH

SEQ ID NO: 4763 - protein, 5 aa, synthetic construct
NGSPH

SEQ ID NO: 4764 - protein, 5 aa, synthetic construct
PGSPH

SEQ ID NO: 4765 - protein, 5 aa, synthetic construct
GGSPH

SEQ ID NO: 4766 - protein, 5 aa, synthetic construct
TGSPH

SEQ ID NO: 4767 - protein, 5 aa, synthetic construct
SVSPH

SEQ ID NO: 4768 - protein, 5 aa, synthetic construct
IGSPH

SEQ ID NO: 4769 - protein, 5 aa, synthetic construct
DGSPH

SEQ ID NO: 4770 - protein, 5 aa, synthetic construct
LGSPH

SEQ ID NO: 4771 - protein, 5 aa, synthetic construct
AGSPH

SEQ ID NO: 4772 - protein, 5 aa, synthetic construct
EGSPH

SEQ ID NO: 4773 - protein, 5 aa, synthetic construct
SASPH

SEQ ID NO: 4774 - protein, 5 aa, synthetic construct
YDSPH

SEQ ID NO: 4775 - protein, 5 aa, synthetic construct
HGSPH

SEQ ID NO: 4776 - protein, 5 aa, synthetic construct
RDSPH

SEQ ID NO: 4777 - protein, 5 aa, synthetic construct
NDSPH

SEQ ID NO: 4778 - protein, 5 aa, synthetic construct
PDSPH

SEQ ID NO: 4779 - protein, 5 aa, synthetic construct
MGSPH

SEQ ID NO: 4780 - protein, 5 aa, synthetic construct
QVSPH

SEQ ID NO: 4781 - protein, 5 aa, synthetic construct
HNSPH

SEQ ID NO: 4782 - protein, 5 aa, synthetic construct
HPSPH

SEQ ID NO: 4783 - protein, 5 aa, synthetic construct
HSSPH

SEQ ID NO: 4784 - protein, 6 aa, synthetic construct
GHDSPH

SEQ ID NO: 4785 - protein, 6 aa, synthetic construct
GQDSPH

SEQ ID NO: 4786 - protein, 6 aa, synthetic construct
VSGSPH

SEQ ID NO: 4787 - protein, 6 aa, synthetic construct
CSGSPH

SEQ ID NO: 4788 - protein, 6 aa, synthetic construct
GRGSPH

SEQ ID NO: 4789 - protein, 6 aa, synthetic construct
CSHSPH

SEQ ID NO: 4790 - protein, 6 aa, synthetic construct
GQSSPH

SEQ ID NO: 4791 - protein, 6 aa, synthetic construct
GSHSPH

SEQ ID NO: 4792 - protein, 6 aa, synthetic construct
GDDSPH

SEQ ID NO: 4793 - protein, 6 aa, synthetic construct
GHESPH

SEQ ID NO: 4794 - protein, 6 aa, synthetic construct
GNYSPH

SEQ ID NO: 4795 - protein, 6 aa, synthetic construct
RVGSPH

SEQ ID NO: 4796 - protein, 6 aa, synthetic construct
GSCSPH

SEQ ID NO: 4797 - protein, 6 aa, synthetic construct
GLLSPH

SEQ ID NO: 4798 - protein, 6 aa, synthetic construct
MSGSPH

SEQ ID NO: 4799 - protein, 6 aa, synthetic construct
RNGSPH

SEQ ID NO: 4800 - protein, 6 aa, synthetic construct
TSGSPH

SEQ ID NO: 4801 - protein, 6 aa, synthetic construct
ISGSPH

SEQ ID NO: 4802 - protein, 6 aa, synthetic construct
GPGSPH

SEQ ID NO: 4803 - protein, 6 aa, synthetic construct
ESGSPH

SEQ ID NO: 4804 - protein, 6 aa, synthetic construct
SSGSPH

SEQ ID NO: 4805 - protein, 6 aa, synthetic construct
GNGSPH

SEQ ID NO: 4806 - protein, 6 aa, synthetic construct
ASGSPH

SEQ ID NO: 4807 - protein, 6 aa, synthetic construct
NSGSPH

SEQ ID NO: 4808 - protein, 6 aa, synthetic construct
LSGSPH

SEQ ID NO: 4809 - protein, 6 aa, synthetic construct
GGGSPH

SEQ ID NO: 4810 - protein, 6 aa, synthetic construct
KSGSPH

SEQ ID NO: 4811 - protein, 6 aa, synthetic construct
HSGSPH

SEQ ID NO: 4812 - protein, 6 aa, synthetic construct
GTGSPH

SEQ ID NO: 4813 - protein, 6 aa, synthetic construct
PSGSPH

SEQ ID NO: 4814 - protein, 6 aa, synthetic construct
GSVSPH

SEQ ID NO: 4815 - protein, 6 aa, synthetic construct
RSGSPH

SEQ ID NO: 4816 - protein, 6 aa, synthetic construct
GIGSPH

SEQ ID NO: 4817 - protein, 6 aa, synthetic construct
WSGSPH

SEQ ID NO: 4818 - protein, 6 aa, synthetic construct
DSGSPH

SEQ ID NO: 4819 - protein, 6 aa, synthetic construct
IDGSPH

SEQ ID NO: 4820 - protein, 6 aa, synthetic construct
GLGSPH

SEQ ID NO: 4821 - protein, 6 aa, synthetic construct
DAGSPH

SEQ ID NO: 4822 - protein, 6 aa, synthetic construct
DGGSPH

SEQ ID NO: 4823 - protein, 6 aa, synthetic construct
MEGSPH

SEQ ID NO: 4824 - protein, 6 aa, synthetic construct
ENGSPH

SEQ ID NO: 4825 - protein, 6 aa, synthetic construct
GSASPH

SEQ ID NO: 4826 - protein, 6 aa, synthetic construct
KNGSPH

SEQ ID NO: 4827 - protein, 6 aa, synthetic construct
KEGSPH

SEQ ID NO: 4828 - protein, 6 aa, synthetic construct
AIGSPH

SEQ ID NO: 4829 - protein, 6 aa, synthetic construct
GYDSPH

SEQ ID NO: 4830 - protein, 6 aa, synthetic construct
GHGSPH

SEQ ID NO: 4831 - protein, 6 aa, synthetic construct
GRDSPH

SEQ ID NO: 4832 - protein, 6 aa, synthetic construct
GNDSPH

SEQ ID NO: 4833 - protein, 6 aa, synthetic construct
GPDSPH

SEQ ID NO: 4834 - protein, 6 aa, synthetic construct
GMGSPH

SEQ ID NO: 4835 - protein, 6 aa, synthetic construct
GQVSPH

SEQ ID NO: 4836 - protein, 6 aa, synthetic construct
GHNSPH

SEQ ID NO: 4837 - protein, 6 aa, synthetic construct
GHPSPH

SEQ ID NO: 4838 - protein, 6 aa, synthetic construct
GHSSPH

SEQ ID NO: 4839 - protein, 7 aa, synthetic construct
SGSPHSK

SEQ ID NO: 4840 - protein, 7 aa, synthetic construct
HDSPHKS

SEQ ID NO: 4841 - protein, 7 aa, synthetic construct
SGSPHAR

SEQ ID NO: 4842 - protein, 7 aa, synthetic construct
SGSPHVK

SEQ ID NO: 4843 - protein, 7 aa, synthetic construct
QDSPHKS

SEQ ID NO: 4844 - protein, 7 aa, synthetic construct
SGSPHKK

SEQ ID NO: 4845 - protein, 7 aa, synthetic construct
SGSPHVR

SEQ ID NO: 4846 - protein, 7 aa, synthetic construct
SGSPHAS

SEQ ID NO: 4847 - protein, 7 aa, synthetic construct
SGSPHRK

SEQ ID NO: 4848 - protein, 7 aa, synthetic construct
SGSPHKT

SEQ ID NO: 4849 - protein, 7 aa, synthetic construct
SHSPHKS

SEQ ID NO: 4850 - protein, 7 aa, synthetic construct
QSSPHRS

SEQ ID NO: 4851 - protein, 7 aa, synthetic construct
RGSPHAS

SEQ ID NO: 4852 - protein, 7 aa, synthetic construct
RGSPHSK

SEQ ID NO: 4853 - protein, 7 aa, synthetic construct
SGSPHKF

SEQ ID NO: 4854 - protein, 7 aa, synthetic construct
SGSPHKI

SEQ ID NO: 4855 - protein, 7 aa, synthetic construct
SGSPHKL

SEQ ID NO: 4856 - protein, 7 aa, synthetic construct
SGSPHKY

SEQ ID NO: 4857 - protein, 7 aa, synthetic construct
SGSPHTR

SEQ ID NO: 4858 - protein, 7 aa, synthetic construct
SHSPHKR

SEQ ID NO: 4859 - protein, 7 aa, synthetic construct
SGSPHGA

SEQ ID NO: 4860 - protein, 7 aa, synthetic construct
HDSPHKR

SEQ ID NO: 4861 - protein, 7 aa, synthetic construct
DDSPHKS

SEQ ID NO: 4862 - protein, 7 aa, synthetic construct
HESPHKS

SEQ ID NO: 4863 - protein, 7 aa, synthetic construct
NYSPHKI

SEQ ID NO: 4864 - protein, 7 aa, synthetic construct
SGSPHSR

SEQ ID NO: 4865 - protein, 7 aa, synthetic construct
SGSPHSL

SEQ ID NO: 4866 - protein, 7 aa, synthetic construct
SGSPHSS

SEQ ID NO: 4867 - protein, 7 aa, synthetic construct
VGSPHSK

SEQ ID NO: 4868 - protein, 7 aa, synthetic construct
SCSPHRK

SEQ ID NO: 4869 - protein, 7 aa, synthetic construct
SGSPHFL

SEQ ID NO: 4870 - protein, 7 aa, synthetic construct
LLSPHWK

SEQ ID NO: 4871 - protein, 7 aa, synthetic construct
NGSPHSK

SEQ ID NO: 4872 - protein, 7 aa, synthetic construct
PGSPHSK

SEQ ID NO: 4873 - protein, 7 aa, synthetic construct
GGSPHSK

SEQ ID NO: 4874 - protein, 7 aa, synthetic construct
TGSPHSK

SEQ ID NO: 4875 - protein, 7 aa, synthetic construct
SVSPHGK

SEQ ID NO: 4876 - protein, 7 aa, synthetic construct
SGSPHTK

SEQ ID NO: 4877 - protein, 7 aa, synthetic construct
IGSPHSK

SEQ ID NO: 4878 - protein, 7 aa, synthetic construct
DGSPHSK

SEQ ID NO: 4879 - protein, 7 aa, synthetic construct
SGSPHNK

SEQ ID NO: 4880 - protein, 7 aa, synthetic construct
LGSPHSK

SEQ ID NO: 4881 - protein, 7 aa, synthetic construct
AGSPHSK

SEQ ID NO: 4882 - protein, 7 aa, synthetic construct
EGSPHSK

SEQ ID NO: 4883 - protein, 7 aa, synthetic construct
SASPHSK

SEQ ID NO: 4884 - protein, 7 aa, synthetic construct
SGSPHAK

SEQ ID NO: 4885 - protein, 7 aa, synthetic construct
HDSPHKI

SEQ ID NO: 4886 - protein, 7 aa, synthetic construct
YDSPHKS

SEQ ID NO: 4887 - protein, 7 aa, synthetic construct
HDSPHKT

SEQ ID NO: 4888 - protein, 7 aa, synthetic construct
RGSPHKR

SEQ ID NO: 4889 - protein, 7 aa, synthetic construct
HGSPHSK

SEQ ID NO: 4890 - protein, 7 aa, synthetic construct
RDSPHKS

SEQ ID NO: 4891 - protein, 7 aa, synthetic construct
NDSPHKS

SEQ ID NO: 4892 - protein, 7 aa, synthetic construct
QDSPHKI

SEQ ID NO: 4893 - protein, 7 aa, synthetic construct
PDSPHKI

SEQ ID NO: 4894 - protein, 7 aa, synthetic construct
PDSPHKS

SEQ ID NO: 4895 - protein, 7 aa, synthetic construct
MGSPHSK

SEQ ID NO: 4896 - protein, 7 aa, synthetic construct
HDSPHKH

SEQ ID NO: 4897 - protein, 7 aa, synthetic construct
QVSPHKS

SEQ ID NO: 4898 - protein, 7 aa, synthetic construct
HNSPHKS

SEQ ID NO: 4899 - protein, 7 aa, synthetic construct
NGSPHKR

SEQ ID NO: 4900 - protein, 7 aa, synthetic construct
HDSPHKY

SEQ ID NO: 4901 - protein, 7 aa, synthetic construct
NDSPHKI

SEQ ID NO: 4902 - protein, 7 aa, synthetic construct
HDSPHKL

SEQ ID NO: 4903 - protein, 7 aa, synthetic construct
HPSPHWK

SEQ ID NO: 4904 - protein, 7 aa, synthetic construct
HDSPHKM

SEQ ID NO: 4905 - protein, 7 aa, synthetic construct
HSSPHRS

SEQ ID NO: 4906 - protein, 9 aa, synthetic construct
GSGSPHARM

SEQ ID NO: 4907 - protein, 9 aa, synthetic construct
GSGSPHVKS

SEQ ID NO: 4908 - protein, 9 aa, synthetic construct
GQDSPHKSG

SEQ ID NO: 4909 - protein, 9 aa, synthetic construct
GSGSPHASR

SEQ ID NO: 4910 - protein, 9 aa, synthetic construct
GSGSPHVKI

SEQ ID NO: 4911 - protein, 9 aa, synthetic construct
GSGSPHKKN

SEQ ID NO: 4912 - protein, 9 aa, synthetic construct
GSGSPHVRM

SEQ ID NO: 4913 - protein, 9 aa, synthetic construct
VSGSPHSKA

SEQ ID NO: 4914 - protein, 9 aa, synthetic construct
CSGSPHSKA

SEQ ID NO: 4915 - protein, 9 aa, synthetic construct
GSGSPHRKA

SEQ ID NO: 4916 - protein, 9 aa, synthetic construct
CSGSPHKTS

SEQ ID NO: 4917 - protein, 9 aa, synthetic construct
CSHSPHKSG

SEQ ID NO: 4918 - protein, 9 aa, synthetic construct
GQSSPHRSG

SEQ ID NO: 4919 - protein, 9 aa, synthetic construct
GRGSPHASR

SEQ ID NO: 4920 - protein, 9 aa, synthetic construct
GRGSPHSKA

SEQ ID NO: 4921 - protein, 9 aa, synthetic construct
GSGSPHKFG

SEQ ID NO: 4922 - protein, 9 aa, synthetic construct
GSGSPHKIG

SEQ ID NO: 4923 - protein, 9 aa, synthetic construct
GSGSPHKLG

SEQ ID NO: 4924 - protein, 9 aa, synthetic construct
GSGSPHKTS

SEQ ID NO: 4925 - protein, 9 aa, synthetic construct
GSGSPHKTT

SEQ ID NO: 4926 - protein, 9 aa, synthetic construct
GSGSPHKTY

SEQ ID NO: 4927 - protein, 9 aa, synthetic construct
GSGSPHKYG

SEQ ID NO: 4928 - protein, 9 aa, synthetic construct
GSGSPHSKD

SEQ ID NO: 4929 - protein, 9 aa, synthetic construct
GSGSPHSKP

SEQ ID NO: 4930 - protein, 9 aa, synthetic construct
GSGSPHTRG

SEQ ID NO: 4931 - protein, 9 aa, synthetic construct
GSGSPHVRG

SEQ ID NO: 4932 - protein, 9 aa, synthetic construct
GSHSPHKRG

SEQ ID NO: 4933 - protein, 9 aa, synthetic construct
GSHSPHKSG

SEQ ID NO: 4934 - protein, 9 aa, synthetic construct
VSGSPHASR

SEQ ID NO: 4935 - protein, 9 aa, synthetic construct
VSGSPHGAR

SEQ ID NO: 4936 - protein, 9 aa, synthetic construct
VSGSPHKFG

SEQ ID NO: 4937 - protein, 9 aa, synthetic construct
GHDSPHKRG

SEQ ID NO: 4938 - protein, 9 aa, synthetic construct
GDDSPHKSG

SEQ ID NO: 4939 - protein, 9 aa, synthetic construct
GHESPHKSA

SEQ ID NO: 4940 - protein, 9 aa, synthetic construct
GHDSPHKSA

SEQ ID NO: 4941 - protein, 9 aa, synthetic construct
GNYSPHKIG

SEQ ID NO: 4942 - protein, 9 aa, synthetic construct
GHDSPHKSR

SEQ ID NO: 4943 - protein, 9 aa, synthetic construct
GSGSPHSKL

SEQ ID NO: 4944 - protein, 9 aa, synthetic construct
GSGSPHSRA

SEQ ID NO: 4945 - protein, 9 aa, synthetic construct
GSGSPHSKR

SEQ ID NO: 4946 - protein, 9 aa, synthetic construct
GSGSPHSLR

SEQ ID NO: 4947 - protein, 9 aa, synthetic construct
GSGSPHSRG

SEQ ID NO: 4948 - protein, 9 aa, synthetic construct
GSGSPHSSR

SEQ ID NO: 4949 - protein, 9 aa, synthetic construct
RVGSPHSKA

SEQ ID NO: 4950 - protein, 9 aa, synthetic construct
GSCSPHRKA

SEQ ID NO: 4951 - protein, 9 aa, synthetic construct
GSGSPHFLR

SEQ ID NO: 4952 - protein, 9 aa, synthetic construct
GSGSPHSKW

SEQ ID NO: 4953 - protein, 9 aa, synthetic construct
GSGSPHSKS

SEQ ID NO: 4954 - protein, 9 aa, synthetic construct
GLLSPHWKA

SEQ ID NO: 4955 - protein, 9 aa, synthetic construct
GSGSPHVRR

SEQ ID NO: 4956 - protein, 9 aa, synthetic construct
GSGSPHSKV

SEQ ID NO: 4957 - protein, 9 aa, synthetic construct
MSGSPHSKA

SEQ ID NO: 4958 - protein, 9 aa, synthetic construct
RNGSPHSKA

SEQ ID NO: 4959 - protein, 9 aa, synthetic construct
TSGSPHSKA

SEQ ID NO: 4960 - protein, 9 aa, synthetic construct
ISGSPHSKA

SEQ ID NO: 4961 - protein, 9 aa, synthetic construct
GPGSPHSKA

SEQ ID NO: 4962 - protein, 9 aa, synthetic construct
GSGSPHSKT

SEQ ID NO: 4963 - protein, 9 aa, synthetic construct
ESGSPHSKA

SEQ ID NO: 4964 - protein, 9 aa, synthetic construct
SSGSPHSKA

SEQ ID NO: 4965 - protein, 9 aa, synthetic construct
GNGSPHSKA

SEQ ID NO: 4966 - protein, 9 aa, synthetic construct
ASGSPHSKA

SEQ ID NO: 4967 - protein, 9 aa, synthetic construct
NSGSPHSKA

SEQ ID NO: 4968 - protein, 9 aa, synthetic construct
LSGSPHSKA

SEQ ID NO: 4969 - protein, 9 aa, synthetic construct
GGGSPHSKA

SEQ ID NO: 4970 - protein, 9 aa, synthetic construct
KSGSPHSKA

SEQ ID NO: 4971 - protein, 9 aa, synthetic construct
GGGSPHSKS

SEQ ID NO: 4972 - protein, 9 aa, synthetic construct
GSGSPHSKG

SEQ ID NO: 4973 - protein, 9 aa, synthetic construct
HSGSPHSKA

SEQ ID NO: 4974 - protein, 9 aa, synthetic construct
GTGSPHSKA

SEQ ID NO: 4975 - protein, 9 aa, synthetic construct
PSGSPHSKA

SEQ ID NO: 4976 - protein, 9 aa, synthetic construct
GSVSPHGKA

SEQ ID NO: 4977 - protein, 9 aa, synthetic construct
RSGSPHSKA

SEQ ID NO: 4978 - protein, 9 aa, synthetic construct
GSGSPHTKA

SEQ ID NO: 4979 - protein, 9 aa, synthetic construct
GIGSPHSKA

SEQ ID NO: 4980 - protein, 9 aa, synthetic construct
WSGSPHSKA

SEQ ID NO: 4981 - protein, 9 aa, synthetic construct
DSGSPHSKA

SEQ ID NO: 4982 - protein, 9 aa, synthetic construct
IDGSPHSKA

SEQ ID NO: 4983 - protein, 9 aa, synthetic construct
GSGSPHNKA

SEQ ID NO: 4984 - protein, 9 aa, synthetic construct
GLGSPHSKS

SEQ ID NO: 4985 - protein, 9 aa, synthetic construct
DAGSPHSKA

SEQ ID NO: 4986 - protein, 9 aa, synthetic construct
DGGSPHSKA

SEQ ID NO: 4987 - protein, 9 aa, synthetic construct
MEGSPHSKA

SEQ ID NO: 4988 - protein, 9 aa, synthetic construct
ENGSPHSKA

SEQ ID NO: 4989 - protein, 9 aa, synthetic construct
GSASPHSKA

SEQ ID NO: 4990 - protein, 9 aa, synthetic construct
GNGSPHSKS

SEQ ID NO: 4991 - protein, 9 aa, synthetic construct
KNGSPHSKA

SEQ ID NO: 4992 - protein, 9 aa, synthetic construct
KEGSPHSKA

SEQ ID NO: 4993 - protein, 9 aa, synthetic construct
AIGSPHSKA

SEQ ID NO: 4994 - protein, 9 aa, synthetic construct
GSGSPHSKN

SEQ ID NO: 4995 - protein, 9 aa, synthetic construct
GSGSPHAKA

SEQ ID NO: 4996 - protein, 9 aa, synthetic construct
GHDSPHKIG

SEQ ID NO: 4997 - protein, 9 aa, synthetic construct
GYDSPHKSG

SEQ ID NO: 4998 - protein, 9 aa, synthetic construct
GHESPHKSG

SEQ ID NO: 4999 - protein, 9 aa, synthetic construct
GHDSPHKTG

SEQ ID NO: 5000 - protein, 9 aa, synthetic construct
GRGSPHKRG

SEQ ID NO: 5001 - protein, 9 aa, synthetic construct
GHDSPHKSL

SEQ ID NO: 5002 - protein, 9 aa, synthetic construct
GHGSPHSKA

SEQ ID NO: 5003 - protein, 9 aa, synthetic construct
GHDSPHKSE

SEQ ID NO: 5004 - protein, 9 aa, synthetic construct
GRDSPHKSG

SEQ ID NO: 5005 - protein, 9 aa, synthetic construct
GNDSPHKSV

SEQ ID NO: 5006 - protein, 9 aa, synthetic construct
GQDSPHKIG

SEQ ID NO: 5007 - protein, 9 aa, synthetic construct
GHDSPHKSV

SEQ ID NO: 5008 - protein, 9 aa, synthetic construct
GPDSPHKIG

SEQ ID NO: 5009 - protein, 9 aa, synthetic construct
GPDSPHKSG

SEQ ID NO: 5010 - protein, 9 aa, synthetic construct
GHDSPHKSW

SEQ ID NO: 5011 - protein, 9 aa, synthetic construct
GHDSPHKSN

SEQ ID NO: 5012 - protein, 9 aa, synthetic construct
GMGSPHSKT

SEQ ID NO: 5013 - protein, 9 aa, synthetic construct
GHDSPHKHG

SEQ ID NO: 5014 - protein, 9 aa, synthetic construct
GQVSPHKSG

SEQ ID NO: 5015 - protein, 9 aa, synthetic construct
GDDSPHKSV

SEQ ID NO: 5016 - protein, 9 aa, synthetic construct
GHNSPHKSG

SEQ ID NO: 5017 - protein, 9 aa, synthetic construct
GNGSPHKRG

SEQ ID NO: 5018 - protein, 9 aa, synthetic construct
GHDSPHKYG

SEQ ID NO: 5019 - protein, 9 aa, synthetic construct
GHDSPHKSQ

SEQ ID NO: 5020 - protein, 9 aa, synthetic construct
GNDSPHKIG

SEQ ID NO: 5021 - protein, 9 aa, synthetic construct
GHDSPHKSK

SEQ ID NO: 5022 - protein, 9 aa, synthetic construct
GHDSPHKLW

SEQ ID NO: 5023 - protein, 9 aa, synthetic construct
GHPSPHWKG

SEQ ID NO: 5024 - protein, 9 aa, synthetic construct
GHDSPHKMG

SEQ ID NO: 5025 - protein, 9 aa, synthetic construct
GHDSPHKMA

SEQ ID NO: 5026 - protein, 9 aa, synthetic construct
GHSSPHRSG

SEQ ID NO: 5027 - protein, 8 aa, synthetic construct
SGSPHKYG

SEQ ID NO: 5028 - protein, 4 aa, synthetic construct
QNQQ

SEQ ID NO: 5029 - protein, 4 aa, synthetic construct
WNQQ

SEQ ID NO: 5030 - protein, 4 aa, synthetic construct
QYYV

SEQ ID NO: 5031 - protein, 4 aa, synthetic construct
RRQQ

SEQ ID NO: 5032 - protein, 4 aa, synthetic construct
GCGQ

SEQ ID NO: 5033 - protein, 4 aa, synthetic construct
LRQQ

SEQ ID NO: 5034 - protein, 4 aa, synthetic construct
RNQQ

SEQ ID NO: 5035 - protein, 4 aa, synthetic construct
VNQQ

SEQ ID NO: 5036 - protein, 4 aa, synthetic construct
FRLQ

SEQ ID NO: 5037 - protein, 4 aa, synthetic construct
FNQQ

SEQ ID NO: 5038 - protein, 4 aa, synthetic construct
LLQQ

SEQ ID NO: 5039 - protein, 4 aa, synthetic construct
SNQQ

SEQ ID NO: 5040 - protein, 4 aa, synthetic construct
RLQQ

SEQ ID NO: 5041 - protein, 4 aa, synthetic construct
LNQQ

SEQ ID NO: 5042 - protein, 4 aa, synthetic construct
QRKL

SEQ ID NO: 5043 - protein, 4 aa, synthetic construct
LRRQ

SEQ ID NO: 5044 - protein, 4 aa, synthetic construct
QRLR

SEQ ID NO: 5045 - protein, 4 aa, synthetic construct
QRRL

SEQ ID NO: 5046 - protein, 4 aa, synthetic construct
RRLQ

SEQ ID NO: 5047 - protein, 4 aa, synthetic construct
RLRQ

SEQ ID NO: 5048 - protein, 4 aa, synthetic construct
SKRQ

SEQ ID NO: 5049 - protein, 4 aa, synthetic construct
QLYR

SEQ ID NO: 5050 - protein, 4 aa, synthetic construct
QLTV

SEQ ID NO: 5051 - protein, 4 aa, synthetic construct
QNKQ

SEQ ID NO: 5052 - protein, 4 aa, synthetic construct
KNQQ

SEQ ID NO: 5053 - protein, 4 aa, synthetic construct
QKQQ

SEQ ID NO: 5054 - protein, 4 aa, synthetic construct
QTQQ

SEQ ID NO: 5055 - protein, 4 aa, synthetic construct
QNHQ

SEQ ID NO: 5056 - protein, 4 aa, synthetic construct
QHQQ

SEQ ID NO: 5057 - protein, 4 aa, synthetic construct
QNQH

SEQ ID NO: 5058 - protein, 4 aa, synthetic construct
QHRQ

SEQ ID NO: 5059 - protein, 4 aa, synthetic construct
LTQQ

SEQ ID NO: 5060 - protein, 4 aa, synthetic construct
QNQW

SEQ ID NO: 5061 - protein, 4 aa, synthetic construct
QNTH

SEQ ID NO: 5062 - protein, 4 aa, synthetic construct
RRRQ

SEQ ID NO: 5063 - protein, 4 aa, synthetic construct
QYQQ

SEQ ID NO: 5064 - protein, 4 aa, synthetic construct
QNDQ

SEQ ID NO: 5065 - protein, 4 aa, synthetic construct
QNRH

SEQ ID NO: 5066 - protein, 4 aa, synthetic construct
RDQQ

SEQ ID NO: 5067 - protein, 4 aa, synthetic construct
PNLQ

SEQ ID NO: 5068 - protein, 4 aa, synthetic construct
HVRQ

SEQ ID NO: 5069 - protein, 4 aa, synthetic construct
PNQH

SEQ ID NO: 5070 - protein, 4 aa, synthetic construct
HNQQ

SEQ ID NO: 5071 - protein, 4 aa, synthetic construct
QSQQ

SEQ ID NO: 5072 - protein, 4 aa, synthetic construct
QPAK

SEQ ID NO: 5073 - protein, 4 aa, synthetic construct
QNLA

SEQ ID NO: 5074 - protein, 4 aa, synthetic construct
QNQL

SEQ ID NO: 5075 - protein, 4 aa, synthetic construct
QGQQ

SEQ ID NO: 5076 - protein, 4 aa, synthetic construct
LNRQ

SEQ ID NO: 5077 - protein, 4 aa, synthetic construct
QNPP

SEQ ID NO: 5078 - protein, 4 aa, synthetic construct
QNLQ

SEQ ID NO: 5079 - protein, 4 aa, synthetic construct
QDQE

SEQ ID NO: 5080 - protein, 4 aa, synthetic construct
QDQQ

SEQ ID NO: 5081 - protein, 4 aa, synthetic construct
HWQQ

SEQ ID NO: 5082 - protein, 4 aa, synthetic construct
PNQQ

SEQ ID NO: 5083 - protein, 4 aa, synthetic construct
PEQQ

SEQ ID NO: 5084 - protein, 4 aa, synthetic construct
QRTM

SEQ ID NO: 5085 - protein, 4 aa, synthetic construct
LHQH

SEQ ID NO: 5086 - protein, 4 aa, synthetic construct
QHRI

SEQ ID NO: 5087 - protein, 4 aa, synthetic construct
QYIH

SEQ ID NO: 5088 - protein, 4 aa, synthetic construct
QKFE

SEQ ID NO: 5089 - protein, 4 aa, synthetic construct
QFPS

SEQ ID NO: 5090 - protein, 4 aa, synthetic construct
QNPL

SEQ ID NO: 5091 - protein, 4 aa, synthetic construct
QAIK

SEQ ID NO: 5092 - protein, 4 aa, synthetic construct
QNRQ

SEQ ID NO: 5093 - protein, 4 aa, synthetic construct
QYQH

SEQ ID NO: 5094 - protein, 4 aa, synthetic construct
QNPQ

SEQ ID NO: 5095 - protein, 4 aa, synthetic construct
QHQL

SEQ ID NO: 5096 - protein, 4 aa, synthetic construct
QSPP

SEQ ID NO: 5097 - protein, 4 aa, synthetic construct
QAKL

SEQ ID NO: 5098 - protein, 4 aa, synthetic construct
KSQQ

SEQ ID NO: 5099 - protein, 4 aa, synthetic construct
QDRP

SEQ ID NO: 5100 - protein, 4 aa, synthetic construct
QNLG

SEQ ID NO: 5101 - protein, 4 aa, synthetic construct
QAFH

SEQ ID NO: 5102 - protein, 4 aa, synthetic construct
QNAQ

SEQ ID NO: 5103 - protein, 4 aa, synthetic construct
HNQL

SEQ ID NO: 5104 - protein, 4 aa, synthetic construct
QKLN

SEQ ID NO: 5105 - protein, 4 aa, synthetic construct
QNVQ

SEQ ID NO: 5106 - protein, 4 aa, synthetic construct
QAQQ

SEQ ID NO: 5107 - protein, 4 aa, synthetic construct
QTPP

SEQ ID NO: 5108 - protein, 4 aa, synthetic construct
QPPA

SEQ ID NO: 5109 - protein, 4 aa, synthetic construct
QERP

SEQ ID NO: 5110 - protein, 4 aa, synthetic construct
QDLQ

SEQ ID NO: 5111 - protein, 4 aa, synthetic construct
QAMH

SEQ ID NO: 5112 - protein, 4 aa, synthetic construct
QHPS

SEQ ID NO: 5113 - protein, 4 aa, synthetic construct
PGLQ

SEQ ID NO: 5114 - protein, 4 aa, synthetic construct
QGIR

SEQ ID NO: 5115 - protein, 4 aa, synthetic construct
QAPA

SEQ ID NO: 5116 - protein, 4 aa, synthetic construct
QIPP

SEQ ID NO: 5117 - protein, 4 aa, synthetic construct
QTQL

SEQ ID NO: 5118 - protein, 4 aa, synthetic construct
QAPS

SEQ ID NO: 5119 - protein, 4 aa, synthetic construct
QNTY

SEQ ID NO: 5120 - protein, 4 aa, synthetic construct
QDKQ

SEQ ID NO: 5121 - protein, 4 aa, synthetic construct
QNHL

SEQ ID NO: 5122 - protein, 4 aa, synthetic construct
QIGM

SEQ ID NO: 5123 - protein, 4 aa, synthetic construct
LNKQ

SEQ ID NO: 5124 - protein, 4 aa, synthetic construct
PNQL

SEQ ID NO: 5125 - protein, 4 aa, synthetic construct
QLQQ

SEQ ID NO: 5126 - protein, 4 aa, synthetic construct
QRMS

SEQ ID NO: 5127 - protein, 4 aa, synthetic construct
QGIL

SEQ ID NO: 5128 - protein, 4 aa, synthetic construct
QDRQ

SEQ ID NO: 5129 - protein, 4 aa, synthetic construct
RDWQ

SEQ ID NO: 5130 - protein, 4 aa, synthetic construct
QERS

SEQ ID NO: 5131 - protein, 4 aa, synthetic construct
QNYQ

SEQ ID NO: 5132 - protein, 4 aa, synthetic construct
QRTC

SEQ ID NO: 5133 - protein, 4 aa, synthetic construct
QIGH

SEQ ID NO: 5134 - protein, 4 aa, synthetic construct
QGAI

SEQ ID NO: 5135 - protein, 4 aa, synthetic construct
QVPP

SEQ ID NO: 5136 - protein, 4 aa, synthetic construct
QVQQ

SEQ ID NO: 5137 - protein, 4 aa, synthetic construct
LMRQ

SEQ ID NO: 5138 - protein, 4 aa, synthetic construct
QYSV

SEQ ID NO: 5139 - protein, 4 aa, synthetic construct
QAIT

SEQ ID NO: 5140 - protein, 4 aa, synthetic construct
QKTL

SEQ ID NO: 5141 - protein, 4 aa, synthetic construct
QLHH

SEQ ID NO: 5142 - protein, 4 aa, synthetic construct
QNII

SEQ ID NO: 5143 - protein, 4 aa, synthetic construct
QGHH

SEQ ID NO: 5144 - protein, 4 aa, synthetic construct
QSKV

SEQ ID NO: 5145 - protein, 4 aa, synthetic construct
QLPS

SEQ ID NO: 5146 - protein, 4 aa, synthetic construct
IGKQ

SEQ ID NO: 5147 - protein, 4 aa, synthetic construct
QAIH

SEQ ID NO: 5148 - protein, 4 aa, synthetic construct
QHGL

SEQ ID NO: 5149 - protein, 4 aa, synthetic construct
QFMC

SEQ ID NO: 5150 - protein, 4 aa, synthetic construct
QNQM

SEQ ID NO: 5151 - protein, 4 aa, synthetic construct
QHLQ

SEQ ID NO: 5152 - protein, 4 aa, synthetic construct
QPAR

SEQ ID NO: 5153 - protein, 4 aa, synthetic construct
QSLQ

SEQ ID NO: 5154 - protein, 4 aa, synthetic construct
QSQL

SEQ ID NO: 5155 - protein, 4 aa, synthetic construct
HSQQ

SEQ ID NO: 5156 - protein, 4 aa, synthetic construct
QMPS

SEQ ID NO: 5157 - protein, 4 aa, synthetic construct
QGSL

SEQ ID NO: 5158 - protein, 4 aa, synthetic construct
QVPA

SEQ ID NO: 5159 - protein, 4 aa, synthetic construct
HYQQ

SEQ ID NO: 5160 - protein, 4 aa, synthetic construct
QVPS

SEQ ID NO: 5161 - protein, 4 aa, synthetic construct
RGEQ

SEQ ID NO: 5162 - protein, 4 aa, synthetic construct
PGQQ

SEQ ID NO: 5163 - protein, 4 aa, synthetic construct
LEQQ

SEQ ID NO: 5164 - protein, 4 aa, synthetic construct
QNQS

SEQ ID NO: 5165 - protein, 4 aa, synthetic construct
QKVI

SEQ ID NO: 5166 - protein, 4 aa, synthetic construct
QNND

SEQ ID NO: 5167 - protein, 4 aa, synthetic construct
QSVH

SEQ ID NO: 5168 - protein, 4 aa, synthetic construct
QPLG

SEQ ID NO: 5169 - protein, 4 aa, synthetic construct
HNQE

SEQ ID NO: 5170 - protein, 4 aa, synthetic construct
QIQQ

SEQ ID NO: 5171 - protein, 4 aa, synthetic construct
QVRN

SEQ ID NO: 5172 - protein, 4 aa, synthetic construct
PSNQ

SEQ ID NO: 5173 - protein, 4 aa, synthetic construct
QVGH

SEQ ID NO: 5174 - protein, 4 aa, synthetic construct
QRDI

SEQ ID NO: 5175 - protein, 4 aa, synthetic construct
QMPN

SEQ ID NO: 5176 - protein, 4 aa, synthetic construct
RGLQ

SEQ ID NO: 5177 - protein, 4 aa, synthetic construct
PSLQ

SEQ ID NO: 5178 - protein, 4 aa, synthetic construct
QRDQ

SEQ ID NO: 5179 - protein, 4 aa, synthetic construct
QAKG

SEQ ID NO: 5180 - protein, 4 aa, synthetic construct
QSAH

SEQ ID NO: 5181 - protein, 4 aa, synthetic construct
QSTM

SEQ ID NO: 5182 - protein, 4 aa, synthetic construct
QREM

SEQ ID NO: 5183 - protein, 4 aa, synthetic construct
QYRA

SEQ ID NO: 5184 - protein, 4 aa, synthetic construct
QRQQ

SEQ ID NO: 5185 - protein, 4 aa, synthetic construct
QWQQ

SEQ ID NO: 5186 - protein, 4 aa, synthetic construct
QRMN

SEQ ID NO: 5187 - protein, 4 aa, synthetic construct
GDSQ

SEQ ID NO: 5188 - protein, 4 aa, synthetic construct
QKIS

SEQ ID NO: 5189 - protein, 4 aa, synthetic construct
PSMQ

SEQ ID NO: 5190 - protein, 4 aa, synthetic construct
SPRQ

SEQ ID NO: 5191 - protein, 4 aa, synthetic construct
MEQQ

SEQ ID NO: 5192 - protein, 4 aa, synthetic construct
QYQN

SEQ ID NO: 5193 - protein, 4 aa, synthetic construct
QIRQ

SEQ ID NO: 5194 - protein, 4 aa, synthetic construct
QSVQ

SEQ ID NO: 5195 - protein, 4 aa, synthetic construct
RSQQ

SEQ ID NO: 5196 - protein, 4 aa, synthetic construct
QNKL

SEQ ID NO: 5197 - protein, 4 aa, synthetic construct
QIQH

SEQ ID NO: 5198 - protein, 4 aa, synthetic construct
PRQQ

SEQ ID NO: 5199 - protein, 4 aa, synthetic construct
HTQQ

SEQ ID NO: 5200 - protein, 4 aa, synthetic construct
QRQH

SEQ ID NO: 5201 - protein, 4 aa, synthetic construct
RNQE

SEQ ID NO: 5202 - protein, 4 aa, synthetic construct
QSKQ

SEQ ID NO: 5203 - protein, 4 aa, synthetic construct
QNQP

SEQ ID NO: 5204 - protein, 4 aa, synthetic construct
QSPQ

SEQ ID NO: 5205 - protein, 4 aa, synthetic construct
QTRQ

SEQ ID NO: 5206 - protein, 4 aa, synthetic construct
QNLH

SEQ ID NO: 5207 - protein, 4 aa, synthetic construct
QNQE

SEQ ID NO: 5208 - protein, 4 aa, synthetic construct
LNQP

SEQ ID NO: 5209 - protein, 4 aa, synthetic construct
QNQD

SEQ ID NO: 5210 - protein, 4 aa, synthetic construct
QNLL

SEQ ID NO: 5211 - protein, 4 aa, synthetic construct
QLVI

SEQ ID NO: 5212 - protein, 4 aa, synthetic construct
RTQE

SEQ ID NO: 5213 - protein, 4 aa, synthetic construct
QTHQ

SEQ ID NO: 5214 - protein, 4 aa, synthetic construct
QDQH

SEQ ID NO: 5215 - protein, 4 aa, synthetic construct
QSQH

SEQ ID NO: 5216 - protein, 4 aa, synthetic construct
VRQQ

SEQ ID NO: 5217 - protein, 4 aa, synthetic construct
AWQQ

SEQ ID NO: 5218 - protein, 4 aa, synthetic construct
QSVP

SEQ ID NO: 5219 - protein, 4 aa, synthetic construct
QNIQ

SEQ ID NO: 5220 - protein, 4 aa, synthetic construct
LDQQ

SEQ ID NO: 5221 - protein, 4 aa, synthetic construct
PDQQ

SEQ ID NO: 5222 - protein, 4 aa, synthetic construct
ESQQ

SEQ ID NO: 5223 - protein, 4 aa, synthetic construct
QRQL

SEQ ID NO: 5224 - protein, 4 aa, synthetic construct
QIIV

SEQ ID NO: 5225 - protein, 4 aa, synthetic construct
QKQS

SEQ ID NO: 5226 - protein, 4 aa, synthetic construct
QSHQ

SEQ ID NO: 5227 - protein, 4 aa, synthetic construct
QFVV

SEQ ID NO: 5228 - protein, 4 aa, synthetic construct
QSQP

SEQ ID NO: 5229 - protein, 4 aa, synthetic construct
QNEQ

SEQ ID NO: 5230 - protein, 4 aa, synthetic construct
INQQ

SEQ ID NO: 5231 - protein, 4 aa, synthetic construct
RNRQ

SEQ ID NO: 5232 - protein, 4 aa, synthetic construct
RDQK

SEQ ID NO: 5233 - protein, 4 aa, synthetic construct
QWKR

SEQ ID NO: 5234 - protein, 4 aa, synthetic construct
ENRQ

SEQ ID NO: 5235 - protein, 4 aa, synthetic construct
QTQP

SEQ ID NO: 5236 - protein, 4 aa, synthetic construct
QKQL

SEQ ID NO: 5237 - protein, 4 aa, synthetic construct
RNQL

SEQ ID NO: 5238 - protein, 4 aa, synthetic construct
ISIQ

SEQ ID NO: 5239 - protein, 4 aa, synthetic construct
QTVC

SEQ ID NO: 5240 - protein, 4 aa, synthetic construct
QQIM

SEQ ID NO: 5241 - protein, 4 aa, synthetic construct
LNHQ

SEQ ID NO: 5242 - protein, 4 aa, synthetic construct
QNQA

SEQ ID NO: 5243 - protein, 4 aa, synthetic construct
QMIH

SEQ ID NO: 5244 - protein, 4 aa, synthetic construct
RNHQ

SEQ ID NO: 5245 - protein, 4 aa, synthetic construct
QKMN

SEQ ID NO: 5246 - protein, 17 aa, synthetic construct
TINGSGSPHKYGQNQQT

SEQ ID NO: 5247 - protein, 7 aa, synthetic construct
SLLWNQQ

SEQ ID NO: 5248 - protein, 7 aa, synthetic construct
SKAQYYV

SEQ ID NO: 5249 - protein, 7 aa, synthetic construct
SKLRRQQ

SEQ ID NO: 5250 - protein, 7 aa, synthetic construct
SIWQNQQ

SEQ ID NO: 5251 - protein, 7 aa, synthetic construct
SKAGCGQ

SEQ ID NO: 5252 - protein, 7 aa, synthetic construct
SRAQNQQ

SEQ ID NO: 5253 - protein, 7 aa, synthetic construct
SKRLRQQ

SEQ ID NO: 5254 - protein, 7 aa, synthetic construct
SLRRNQQ

SEQ ID NO: 5255 - protein, 7 aa, synthetic construct
SRGRNQQ

SEQ ID NO: 5256 - protein, 7 aa, synthetic construct
SEIVNQQ

SEQ ID NO: 5257 - protein, 7 aa, synthetic construct
SSRRNQQ

SEQ ID NO: 5258 - protein, 7 aa, synthetic construct
CLLQNQQ

SEQ ID NO: 5259 - protein, 7 aa, synthetic construct
SKAFRLQ

SEQ ID NO: 5260 - protein, 7 aa, synthetic construct
CLAQNQQ

SEQ ID NO: 5261 - protein, 7 aa, synthetic construct
FLRQNQQ

SEQ ID NO: 5262 - protein, 7 aa, synthetic construct
SLRFNQQ

SEQ ID NO: 5263 - protein, 7 aa, synthetic construct
SYLRNQQ

SEQ ID NO: 5264 - protein, 7 aa, synthetic construct
CSLQNQQ

SEQ ID NO: 5265 - protein, 7 aa, synthetic construct
VLWQNQQ

SEQ ID NO: 5266 - protein, 7 aa, synthetic construct
SKWLLQQ

SEQ ID NO: 5267 - protein, 7 aa, synthetic construct
SLWSNQQ

SEQ ID NO: 5268 - protein, 7 aa, synthetic construct
SKRRLQQ

SEQ ID NO: 5269 - protein, 7 aa, synthetic construct
SVYLNQQ

SEQ ID NO: 5270 - protein, 7 aa, synthetic construct
SLWLNQQ

SEQ ID NO: 5271 - protein, 7 aa, synthetic construct
SKAQRKL

SEQ ID NO: 5272 - protein, 7 aa, synthetic construct
SKALRRQ

SEQ ID NO: 5273 - protein, 7 aa, synthetic construct
SKAQRLR

SEQ ID NO: 5274 - protein, 7 aa, synthetic construct
SKAQNQQ

SEQ ID NO: 5275 - protein, 7 aa, synthetic construct
SKAQRRL

SEQ ID NO: 5276 - protein, 7 aa, synthetic construct
SKARRQQ

SEQ ID NO: 5277 - protein, 7 aa, synthetic construct
SKARRLQ

SEQ ID NO: 5278 - protein, 7 aa, synthetic construct
SKSRRQQ

SEQ ID NO: 5279 - protein, 7 aa, synthetic construct
SKARLRQ

SEQ ID NO: 5280 - protein, 7 aa, synthetic construct
SKASKRQ

SEQ ID NO: 5281 - protein, 7 aa, synthetic construct
VRRQNQQ

SEQ ID NO: 5282 - protein, 7 aa, synthetic construct
SKAQLYR

SEQ ID NO: 5283 - protein, 7 aa, synthetic construct
SLFRNQQ

SEQ ID NO: 5284 - protein, 7 aa, synthetic construct
SKAQLTV

SEQ ID NO: 5285 - protein, 13 aa, synthetic construct
GSGSPHSLLWNQQ

SEQ ID NO: 5286 - protein, 13 aa, synthetic construct
GSGSPHSIWQNQQ

SEQ ID NO: 5287 - protein, 13 aa, synthetic construct
GSGSPHSEIVNQQ

SEQ ID NO: 5288 - protein, 13 aa, synthetic construct
GSGSPHCLLQNQQ

SEQ ID NO: 5289 - protein, 13 aa, synthetic construct
GSGSPHCLAQNQQ

SEQ ID NO: 5290 - protein, 13 aa, synthetic construct
GSGSPHSYLRNQQ

SEQ ID NO: 5291 - protein, 13 aa, synthetic construct
GSGSPHCSLQNQQ

SEQ ID NO: 5292 - protein, 13 aa, synthetic construct
GSGSPHVLWQNQQ

SEQ ID NO: 5293 - protein, 13 aa, synthetic construct
GSGSPHSLWSNQQ

SEQ ID NO: 5294 - protein, 13 aa, synthetic construct
GSGSPHSVYLNQQ

SEQ ID NO: 5295 - protein, 13 aa, synthetic construct
GSGSPHSLWLNQQ

SEQ ID NO: 5296 - protein, 13 aa, synthetic construct
GSGSPHSLFRNQQ

SEQ ID NO: 5297 - protein, 6 aa, synthetic construct
TINGHD

SEQ ID NO: 5298 - protein, 6 aa, synthetic construct
MPEGHD

SEQ ID NO: 5299 - protein, 6 aa, synthetic construct
MEGGHD

SEQ ID NO: 5300 - protein, 6 aa, synthetic construct
MEYGHD

SEQ ID NO: 5301 - protein, 6 aa, synthetic construct
AEWGHD

SEQ ID NO: 5302 - protein, 6 aa, synthetic construct
CEWGHD

SEQ ID NO: 5303 - protein, 6 aa, synthetic construct
ANNGQD

SEQ ID NO: 5304 - protein, 6 aa, synthetic construct
IPEGHD

SEQ ID NO: 5305 - protein, 6 aa, synthetic construct
ADMGHD

SEQ ID NO: 5306 - protein, 6 aa, synthetic construct
IEYGHD

SEQ ID NO: 5307 - protein, 6 aa, synthetic construct
ADYGHD

SEQ ID NO: 5308 - protein, 6 aa, synthetic construct
IETGHD

SEQ ID NO: 5309 - protein, 6 aa, synthetic construct
MEWGHD

SEQ ID NO: 5310 - protein, 6 aa, synthetic construct
CEYGHD

SEQ ID NO: 5311 - protein, 6 aa, synthetic construct
RINGHD

SEQ ID NO: 5312 - protein, 6 aa, synthetic construct
MEIGHD

SEQ ID NO: 5313 - protein, 6 aa, synthetic construct
LEYGHD

SEQ ID NO: 5314 - protein, 6 aa, synthetic construct
ADWGHD

SEQ ID NO: 5315 - protein, 6 aa, synthetic construct
IEIGHD

SEQ ID NO: 5316 - protein, 6 aa, synthetic construct
TIKDND

SEQ ID NO: 5317 - protein, 6 aa, synthetic construct
DIMGHD

SEQ ID NO: 5318 - protein, 6 aa, synthetic construct
FEQGHD

SEQ ID NO: 5319 - protein, 6 aa, synthetic construct
MEFGHD

SEQ ID NO: 5320 - protein, 6 aa, synthetic construct
CDQGHD

SEQ ID NO: 5321 - protein, 6 aa, synthetic construct
LPEGHD

SEQ ID NO: 5322 - protein, 6 aa, synthetic construct
IENGHD

SEQ ID NO: 5323 - protein, 6 aa, synthetic construct
MESGHD

SEQ ID NO: 5324 - protein, 6 aa, synthetic construct
AEIGHD

SEQ ID NO: 5325 - protein, 6 aa, synthetic construct
VEYGHD

SEQ ID NO: 5326 - protein, 6 aa, synthetic construct
TSNGDD

SEQ ID NO: 5327 - protein, 6 aa, synthetic construct
IEVGHD

SEQ ID NO: 5328 - protein, 6 aa, synthetic construct
MEMGHD

SEQ ID NO: 5329 - protein, 6 aa, synthetic construct
AEVGHD

SEQ ID NO: 5330 - protein, 6 aa, synthetic construct
MDAGHD

SEQ ID NO: 5331 - protein, 6 aa, synthetic construct
VEWGHD

SEQ ID NO: 5332 - protein, 6 aa, synthetic construct
AEQGHD

SEQ ID NO: 5333 - protein, 6 aa, synthetic construct
LEWGHD

SEQ ID NO: 5334 - protein, 6 aa, synthetic construct
MELGHD

SEQ ID NO: 5335 - protein, 6 aa, synthetic construct
METGHD

SEQ ID NO: 5336 - protein, 6 aa, synthetic construct
MEAGHD

SEQ ID NO: 5337 - protein, 6 aa, synthetic construct
TINRQR

SEQ ID NO: 5338 - protein, 6 aa, synthetic construct
IESGHD

SEQ ID NO: 5339 - protein, 6 aa, synthetic construct
TAKDHD

SEQ ID NO: 5340 - protein, 6 aa, synthetic construct
MEVGHD

SEQ ID NO: 5341 - protein, 6 aa, synthetic construct
CEIGHD

SEQ ID NO: 5342 - protein, 6 aa, synthetic construct
ATNGHD

SEQ ID NO: 5343 - protein, 6 aa, synthetic construct
MDGGHD

SEQ ID NO: 5344 - protein, 6 aa, synthetic construct
QEVGHD

SEQ ID NO: 5345 - protein, 6 aa, synthetic construct
ADQGHD

SEQ ID NO: 5346 - protein, 6 aa, synthetic construct
NMNGHD

SEQ ID NO: 5347 - protein, 6 aa, synthetic construct
TPWEHD

SEQ ID NO: 5348 - protein, 6 aa, synthetic construct
IEMGHD

SEQ ID NO: 5349 - protein, 6 aa, synthetic construct
TANEHD

SEQ ID NO: 5350 - protein, 6 aa, synthetic construct
QQQGHD

SEQ ID NO: 5351 - protein, 6 aa, synthetic construct
TPQDHD

SEQ ID NO: 5352 - protein, 6 aa, synthetic construct
HDWGHD

SEQ ID NO: 5353 - protein, 6 aa, synthetic construct
IEGGHD

SEQ ID NO: 5354 - protein, 11 aa, synthetic construct
TINGHDSPHKR

SEQ ID NO: 5355 - protein, 11 aa, synthetic construct
MPEGHDSPHKS

SEQ ID NO: 5356 - protein, 11 aa, synthetic construct
MEGGHDSPHKS

SEQ ID NO: 5357 - protein, 11 aa, synthetic construct
MEYGHDSPHKS

SEQ ID NO: 5358 - protein, 11 aa, synthetic construct
AEWGHDSPHKS

SEQ ID NO: 5359 - protein, 11 aa, synthetic construct
CEWGHDSPHKS

SEQ ID NO: 5360 - protein, 11 aa, synthetic construct
ANNGQDSPHKS

SEQ ID NO: 5361 - protein, 11 aa, synthetic construct
IPEGHDSPHKS

SEQ ID NO: 5362 - protein, 11 aa, synthetic construct
ADMGHDSPHKS

SEQ ID NO: 5363 - protein, 11 aa, synthetic construct
IEYGHDSPHKS

SEQ ID NO: 5364 - protein, 11 aa, synthetic construct
ADYGHDSPHKS

SEQ ID NO: 5365 - protein, 11 aa, synthetic construct
IETGHDSPHKS

SEQ ID NO: 5366 - protein, 11 aa, synthetic construct
MEWGHDSPHKS

SEQ ID NO: 5367 - protein, 11 aa, synthetic construct
CEYGHDSPHKS

SEQ ID NO: 5368 - protein, 11 aa, synthetic construct
RINGHDSPHKS

SEQ ID NO: 5369 - protein, 11 aa, synthetic construct
MEIGHDSPHKS

SEQ ID NO: 5370 - protein, 11 aa, synthetic construct
LEYGHDSPHKS

SEQ ID NO: 5371 - protein, 11 aa, synthetic construct
ADWGHDSPHKS

SEQ ID NO: 5372 - protein, 11 aa, synthetic construct
IEIGHDSPHKS

SEQ ID NO: 5373 - protein, 11 aa, synthetic construct
TIKDNDSPHKS

SEQ ID NO: 5374 - protein, 11 aa, synthetic construct
DIMGHDSPHKS

SEQ ID NO: 5375 - protein, 11 aa, synthetic construct
FEQGHDSPHKS

SEQ ID NO: 5376 - protein, 11 aa, synthetic construct
MEFGHDSPHKS

SEQ ID NO: 5377 - protein, 11 aa, synthetic construct
CDQGHDSPHKS

SEQ ID NO: 5378 - protein, 11 aa, synthetic construct
LPEGHDSPHKS

SEQ ID NO: 5379 - protein, 11 aa, synthetic construct
IENGHDSPHKS

SEQ ID NO: 5380 - protein, 11 aa, synthetic construct
MESGHDSPHKS

SEQ ID NO: 5381 - protein, 11 aa, synthetic construct
AEIGHDSPHKS

SEQ ID NO: 5382 - protein, 11 aa, synthetic construct
VEYGHDSPHKS

SEQ ID NO: 5383 - protein, 11 aa, synthetic construct
TSNGDDSPHKS

SEQ ID NO: 5384 - protein, 11 aa, synthetic construct
IEVGHDSPHKS

SEQ ID NO: 5385 - protein, 11 aa, synthetic construct
MEMGHDSPHKS

SEQ ID NO: 5386 - protein, 11 aa, synthetic construct
AEVGHDSPHKS

SEQ ID NO: 5387 - protein, 11 aa, synthetic construct
MDAGHDSPHKS

SEQ ID NO: 5388 - protein, 11 aa, synthetic construct
VEWGHDSPHKS

SEQ ID NO: 5389 - protein, 11 aa, synthetic construct
AEQGHDSPHKS

SEQ ID NO: 5390 - protein, 11 aa, synthetic construct
LEWGHDSPHKS

SEQ ID NO: 5391 - protein, 11 aa, synthetic construct
MELGHDSPHKS

SEQ ID NO: 5392 - protein, 11 aa, synthetic construct
METGHDSPHKS

SEQ ID NO: 5393 - protein, 11 aa, synthetic construct
MEAGHDSPHKS

SEQ ID NO: 5394 - protein, 11 aa, synthetic construct
TINRQRSPHKS

SEQ ID NO: 5395 - protein, 11 aa, synthetic construct
IESGHDSPHKS

SEQ ID NO: 5396 - protein, 11 aa, synthetic construct
TAKDHDSPHKS

SEQ ID NO: 5397 - protein, 11 aa, synthetic construct
MEVGHDSPHKS

SEQ ID NO: 5398 - protein, 11 aa, synthetic construct
CEIGHDSPHKS

SEQ ID NO: 5399 - protein, 11 aa, synthetic construct
ATNGHDSPHKS

SEQ ID NO: 5400 - protein, 11 aa, synthetic construct
MDGGHDSPHKS

SEQ ID NO: 5401 - protein, 11 aa, synthetic construct
QEVGHDSPHKS

SEQ ID NO: 5402 - protein, 11 aa, synthetic construct
ADQGHDSPHKS

SEQ ID NO: 5403 - protein, 11 aa, synthetic construct
NMNGHDSPHKS

SEQ ID NO: 5404 - protein, 11 aa, synthetic construct
TPWEHDSPHKS

SEQ ID NO: 5405 - protein, 11 aa, synthetic construct
IEMGHDSPHKS

SEQ ID NO: 5406 - protein, 11 aa, synthetic construct
TANEHDSPHKS

SEQ ID NO: 5407 - protein, 11 aa, synthetic construct
TINGHDSPHKS

SEQ ID NO: 5408 - protein, 11 aa, synthetic construct
QQQGHDSPHKS

SEQ ID NO: 5409 - protein, 11 aa, synthetic construct
TPQDHDSPHKS

SEQ ID NO: 5410 - protein, 11 aa, synthetic construct
HDWGHDSPHKS

SEQ ID NO: 5411 - protein, 11 aa, synthetic construct
IEGGHDSPHKS

SEQ ID NO: 5412 - protein, 5 aa, synthetic construct
QNQQT

SEQ ID NO: 5413 - protein, 5 aa, synthetic construct
QNRHT

SEQ ID NO: 5414 - protein, 5 aa, synthetic construct
RDQQT

SEQ ID NO: 5415 - protein, 5 aa, synthetic construct
PNLQT

SEQ ID NO: 5416 - protein, 5 aa, synthetic construct
HVRQT

SEQ ID NO: 5417 - protein, 5 aa, synthetic construct
PNQHT

SEQ ID NO: 5418 - protein, 5 aa, synthetic construct
QSQQT

SEQ ID NO: 5419 - protein, 5 aa, synthetic construct
QNQQI

SEQ ID NO: 5420 - protein, 5 aa, synthetic construct
QPAKT

SEQ ID NO: 5421 - protein, 5 aa, synthetic construct
QTQQN

SEQ ID NO: 5422 - protein, 5 aa, synthetic construct
QNLAT

SEQ ID NO: 5423 - protein, 5 aa, synthetic construct
QNQLT

SEQ ID NO: 5424 - protein, 5 aa, synthetic construct
QGQQT

SEQ ID NO: 5425 - protein, 5 aa, synthetic construct
LNRQS

SEQ ID NO: 5426 - protein, 5 aa, synthetic construct
HNQQT

SEQ ID NO: 5427 - protein, 5 aa, synthetic construct
QNPPT

SEQ ID NO: 5428 - protein, 5 aa, synthetic construct
QNLQT

SEQ ID NO: 5429 - protein, 5 aa, synthetic construct
QYQQT

SEQ ID NO: 5430 - protein, 5 aa, synthetic construct
QDQET

SEQ ID NO: 5431 - protein, 5 aa, synthetic construct
QNHQT

SEQ ID NO: 5432 - protein, 5 aa, synthetic construct
QDQQT

SEQ ID NO: 5433 - protein, 5 aa, synthetic construct
HWQQT

SEQ ID NO: 5434 - protein, 5 aa, synthetic construct
PNQQT

SEQ ID NO: 5435 - protein, 5 aa, synthetic construct
QNQLI

SEQ ID NO: 5436 - protein, 5 aa, synthetic construct
PEQQT

SEQ ID NO: 5437 - protein, 5 aa, synthetic construct
QRTMT

SEQ ID NO: 5438 - protein, 5 aa, synthetic construct
QNQQH

SEQ ID NO: 5439 - protein, 5 aa, synthetic construct
LHQHT

SEQ ID NO: 5440 - protein, 5 aa, synthetic construct
QHRIT

SEQ ID NO: 5441 - protein, 5 aa, synthetic construct
QYIHT

SEQ ID NO: 5442 - protein, 5 aa, synthetic construct
QKFET

SEQ ID NO: 5443 - protein, 5 aa, synthetic construct
QFPST

SEQ ID NO: 5444 - protein, 5 aa, synthetic construct
HNQQR

SEQ ID NO: 5445 - protein, 5 aa, synthetic construct
QAIKT

SEQ ID NO: 5446 - protein, 5 aa, synthetic construct
QNRQT

SEQ ID NO: 5447 - protein, 5 aa, synthetic construct
QYQHT

SEQ ID NO: 5448 - protein, 5 aa, synthetic construct
QNPQS

SEQ ID NO: 5449 - protein, 5 aa, synthetic construct
QHQLT

SEQ ID NO: 5450 - protein, 5 aa, synthetic construct
QSPPT

SEQ ID NO: 5451 - protein, 5 aa, synthetic construct
QAKLT

SEQ ID NO: 5452 - protein, 5 aa, synthetic construct
KSQQT

SEQ ID NO: 5453 - protein, 5 aa, synthetic construct
QDRPT

SEQ ID NO: 5454 - protein, 5 aa, synthetic construct
QSQQL

SEQ ID NO: 5455 - protein, 5 aa, synthetic construct
QAFHT

SEQ ID NO: 5456 - protein, 5 aa, synthetic construct
QKQQD

SEQ ID NO: 5457 - protein, 5 aa, synthetic construct
QNAQT

SEQ ID NO: 5458 - protein, 5 aa, synthetic construct
HNQLT

SEQ ID NO: 5459 - protein, 5 aa, synthetic construct
QNQQY

SEQ ID NO: 5460 - protein, 5 aa, synthetic construct
QKLNT

SEQ ID NO: 5461 - protein, 5 aa, synthetic construct
QNVQT

SEQ ID NO: 5462 - protein, 5 aa, synthetic construct
QAQQT

SEQ ID NO: 5463 - protein, 5 aa, synthetic construct
QNLQA

SEQ ID NO: 5464 - protein, 5 aa, synthetic construct
QTPPT

SEQ ID NO: 5465 - protein, 5 aa, synthetic construct
QYQHA

SEQ ID NO: 5466 - protein, 5 aa, synthetic construct
QGQQA

SEQ ID NO: 5467 - protein, 5 aa, synthetic construct
QPPAT

SEQ ID NO: 5468 - protein, 5 aa, synthetic construct
QERPT

SEQ ID NO: 5469 - protein, 5 aa, synthetic construct
QDLQT

SEQ ID NO: 5470 - protein, 5 aa, synthetic construct
QAMHT

SEQ ID NO: 5471 - protein, 5 aa, synthetic construct
LNQQT

SEQ ID NO: 5472 - protein, 5 aa, synthetic construct
QHPST

SEQ ID NO: 5473 - protein, 5 aa, synthetic construct
PGLQT

SEQ ID NO: 5474 - protein, 5 aa, synthetic construct
QGIRT

SEQ ID NO: 5475 - protein, 5 aa, synthetic construct
QAPAT

SEQ ID NO: 5476 - protein, 5 aa, synthetic construct
QSQQI

SEQ ID NO: 5477 - protein, 5 aa, synthetic construct
QIPPT

SEQ ID NO: 5478 - protein, 5 aa, synthetic construct
QTQLT

SEQ ID NO: 5479 - protein, 5 aa, synthetic construct
QAPST

SEQ ID NO: 5480 - protein, 5 aa, synthetic construct
QNTYA

SEQ ID NO: 5481 - protein, 5 aa, synthetic construct
QNQHI

SEQ ID NO: 5482 - protein, 5 aa, synthetic construct
QNHLT

SEQ ID NO: 5483 - protein, 5 aa, synthetic construct
QIGMT

SEQ ID NO: 5484 - protein, 5 aa, synthetic construct
LNKQT

SEQ ID NO: 5485 - protein, 5 aa, synthetic construct
QLQQT

SEQ ID NO: 5486 - protein, 5 aa, synthetic construct
QRMST

SEQ ID NO: 5487 - protein, 5 aa, synthetic construct
QGILT

SEQ ID NO: 5488 - protein, 5 aa, synthetic construct
QDRQT

SEQ ID NO: 5489 - protein, 5 aa, synthetic construct
RDWQT

SEQ ID NO: 5490 - protein, 5 aa, synthetic construct
QNTHD

SEQ ID NO: 5491 - protein, 5 aa, synthetic construct
PNLQI

SEQ ID NO: 5492 - protein, 5 aa, synthetic construct
QERST

SEQ ID NO: 5493 - protein, 5 aa, synthetic construct
QNYQT

SEQ ID NO: 5494 - protein, 5 aa, synthetic construct
QRTCT

SEQ ID NO: 5495 - protein, 5 aa, synthetic construct
QIGHT

SEQ ID NO: 5496 - protein, 5 aa, synthetic construct
QGAIT

SEQ ID NO: 5497 - protein, 5 aa, synthetic construct
QVPPT

SEQ ID NO: 5498 - protein, 5 aa, synthetic construct
QVQQI

SEQ ID NO: 5499 - protein, 5 aa, synthetic construct
LMRQT

SEQ ID NO: 5500 - protein, 5 aa, synthetic construct
QYSVT

SEQ ID NO: 5501 - protein, 5 aa, synthetic construct
QAITT

SEQ ID NO: 5502 - protein, 5 aa, synthetic construct
QKTLT

SEQ ID NO: 5503 - protein, 5 aa, synthetic construct
QNQWT

SEQ ID NO: 5504 - protein, 5 aa, synthetic construct
QLHHT

SEQ ID NO: 5505 - protein, 5 aa, synthetic construct
QNIII

SEQ ID NO: 5506 - protein, 5 aa, synthetic construct
QGHHT

SEQ ID NO: 5507 - protein, 5 aa, synthetic construct
QSKVT

SEQ ID NO: 5508 - protein, 5 aa, synthetic construct
QLPST

SEQ ID NO: 5509 - protein, 5 aa, synthetic construct
IGKQT

SEQ ID NO: 5510 - protein, 5 aa, synthetic construct
QAIHT

SEQ ID NO: 5511 - protein, 5 aa, synthetic construct
QHGLT

SEQ ID NO: 5512 - protein, 5 aa, synthetic construct
QFMCT

SEQ ID NO: 5513 - protein, 5 aa, synthetic construct
QHLQT

SEQ ID NO: 5514 - protein, 5 aa, synthetic construct
QNHQN

SEQ ID NO: 5515 - protein, 5 aa, synthetic construct
QPART

SEQ ID NO: 5516 - protein, 5 aa, synthetic construct
QSLQT

SEQ ID NO: 5517 - protein, 5 aa, synthetic construct
QSQLT

SEQ ID NO: 5518 - protein, 5 aa, synthetic construct
QDRQS

SEQ ID NO: 5519 - protein, 5 aa, synthetic construct
QMPST

SEQ ID NO: 5520 - protein, 5 aa, synthetic construct
QGSLT

SEQ ID NO: 5521 - protein, 5 aa, synthetic construct
QVPAT

SEQ ID NO: 5522 - protein, 5 aa, synthetic construct
QDKQT

SEQ ID NO: 5523 - protein, 5 aa, synthetic construct
HYQQT

SEQ ID NO: 5524 - protein, 5 aa, synthetic construct
QVPST

SEQ ID NO: 5525 - protein, 5 aa, synthetic construct
RGEQT

SEQ ID NO: 5526 - protein, 5 aa, synthetic construct
PGQQT

SEQ ID NO: 5527 - protein, 5 aa, synthetic construct
QSLQI

SEQ ID NO: 5528 - protein, 5 aa, synthetic construct
LEQQT

SEQ ID NO: 5529 - protein, 5 aa, synthetic construct
QNQST

SEQ ID NO: 5530 - protein, 5 aa, synthetic construct
QKVIT

SEQ ID NO: 5531 - protein, 5 aa, synthetic construct
QNNDQ

SEQ ID NO: 5532 - protein, 5 aa, synthetic construct
QSVHT

SEQ ID NO: 5533 - protein, 5 aa, synthetic construct
QPLGT

SEQ ID NO: 5534 - protein, 5 aa, synthetic construct
HNQET

SEQ ID NO: 5535 - protein, 5 aa, synthetic construct
QNLQI

SEQ ID NO: 5536 - protein, 5 aa, synthetic construct
QIQQT

SEQ ID NO: 5537 - protein, 5 aa, synthetic construct
QVRNT

SEQ ID NO: 5538 - protein, 5 aa, synthetic construct
PSNQT

SEQ ID NO: 5539 - protein, 5 aa, synthetic construct
QVGHT

SEQ ID NO: 5540 - protein, 5 aa, synthetic construct
QRDIT

SEQ ID NO: 5541 - protein, 5 aa, synthetic construct
QMPNT

SEQ ID NO: 5542 - protein, 5 aa, synthetic construct
RGLQT

SEQ ID NO: 5543 - protein, 5 aa, synthetic construct
QKQQT

SEQ ID NO: 5544 - protein, 5 aa, synthetic construct
PSLQT

SEQ ID NO: 5545 - protein, 5 aa, synthetic construct
QRDQT

SEQ ID NO: 5546 - protein, 5 aa, synthetic construct
QAKGT

SEQ ID NO: 5547 - protein, 5 aa, synthetic construct
QSAHT

SEQ ID NO: 5548 - protein, 5 aa, synthetic construct
QSTMT

SEQ ID NO: 5549 - protein, 5 aa, synthetic construct
QREMT

SEQ ID NO: 5550 - protein, 5 aa, synthetic construct
QYRAT

SEQ ID NO: 5551 - protein, 5 aa, synthetic construct
QWQQT

SEQ ID NO: 5552 - protein, 5 aa, synthetic construct
QRMNT

SEQ ID NO: 5553 - protein, 5 aa, synthetic construct
GDSQT

SEQ ID NO: 5554 - protein, 5 aa, synthetic construct
QKIST

SEQ ID NO: 5555 - protein, 5 aa, synthetic construct
PSMQT

SEQ ID NO: 5556 - protein, 5 aa, synthetic construct
SPRQT

SEQ ID NO: 5557 - protein, 5 aa, synthetic construct
MEQQT

SEQ ID NO: 5558 - protein, 5 aa, synthetic construct
QYQNT

SEQ ID NO: 5559 - protein, 5 aa, synthetic construct
QHQQT

SEQ ID NO: 5560 - protein, 5 aa, synthetic construct
INQQT

SEQ ID NO: 5561 - protein, 5 aa, synthetic construct
PNQQH

SEQ ID NO: 5562 - protein, 5 aa, synthetic construct
ENRQT

SEQ ID NO: 5563 - protein, 5 aa, synthetic construct
QTQQA

SEQ ID NO: 5564 - protein, 5 aa, synthetic construct
QNQAT

SEQ ID NO: 5565 - protein, 4 aa, synthetic construct
KTII

SEQ ID NO: 5566 - protein, 4 aa, synthetic construct
KTFP

SEQ ID NO: 5567 - protein, 4 aa, synthetic construct
KTEK

SEQ ID NO: 5568 - protein, 4 aa, synthetic construct
KTVN

SEQ ID NO: 5569 - protein, 4 aa, synthetic construct
KTFN

SEQ ID NO: 5570 - protein, 4 aa, synthetic construct
KTIN

SEQ ID NO: 5571 - protein, 4 aa, synthetic construct
TTIN

SEQ ID NO: 5572 - protein, 4 aa, synthetic construct
KSIN

SEQ ID NO: 5573 - protein, 4 aa, synthetic construct
KTER

SEQ ID NO: 5574 - protein, 4 aa, synthetic construct
KELH

SEQ ID NO: 5575 - protein, 4 aa, synthetic construct
KAIN

SEQ ID NO: 5576 - protein, 4 aa, synthetic construct
KTDN

SEQ ID NO: 5577 - protein, 4 aa, synthetic construct
KTFH

SEQ ID NO: 5578 - protein, 4 aa, synthetic construct
KTSN

SEQ ID NO: 5579 - protein, 4 aa, synthetic construct
ETIN

SEQ ID NO: 5580 - protein, 4 aa, synthetic construct
NTIN

SEQ ID NO: 5581 - protein, 4 aa, synthetic construct
KTEN

SEQ ID NO: 5582 - protein, 4 aa, synthetic construct
KTSS

SEQ ID NO: 5583 - protein, 4 aa, synthetic construct
KTCN

SEQ ID NO: 5584 - protein, 4 aa, synthetic construct
KTEH

SEQ ID NO: 5585 - protein, 4 aa, synthetic construct
KAEM

SEQ ID NO: 5586 - protein, 4 aa, synthetic construct
KATN

SEQ ID NO: 5587 - protein, 4 aa, synthetic construct
KAIK

SEQ ID NO: 5588 - protein, 4 aa, synthetic construct
KTDK

SEQ ID NO: 5589 - protein, 4 aa, synthetic construct
KTFK

SEQ ID NO: 5590 - protein, 4 aa, synthetic construct
KSDQ

SEQ ID NO: 5591 - protein, 4 aa, synthetic construct
KTEI

SEQ ID NO: 5592 - protein, 4 aa, synthetic construct
KTID

SEQ ID NO: 5593 - protein, 4 aa, synthetic construct
KNTN

SEQ ID NO: 5594 - protein, 4 aa, synthetic construct
KTET

SEQ ID NO: 5595 - protein, 4 aa, synthetic construct
KTEL

SEQ ID NO: 5596 - protein, 4 aa, synthetic construct
KNIN

SEQ ID NO: 5597 - protein, 4 aa, synthetic construct
KTEA

SEQ ID NO: 5598 - protein, 4 aa, synthetic construct
KTAN

SEQ ID NO: 5599 - protein, 4 aa, synthetic construct
NTIY

SEQ ID NO: 5600 - protein, 4 aa, synthetic construct
KTFS

SEQ ID NO: 5601 - protein, 4 aa, synthetic construct
KTES

SEQ ID NO: 5602 - protein, 4 aa, synthetic construct
KTTN

SEQ ID NO: 5603 - protein, 4 aa, synthetic construct
KTED

SEQ ID NO: 5604 - protein, 4 aa, synthetic construct
KTNN

SEQ ID NO: 5605 - protein, 4 aa, synthetic construct
KEVH

SEQ ID NO: 5606 - protein, 4 aa, synthetic construct
KTIS

SEQ ID NO: 5607 - protein, 4 aa, synthetic construct
KTVR

SEQ ID NO: 5608 - protein, 4 aa, synthetic construct
KTDR

SEQ ID NO: 5609 - protein, 4 aa, synthetic construct
ETIK

SEQ ID NO: 5610 - protein, 4 aa, synthetic construct
KNHI

SEQ ID NO: 5611 - protein, 4 aa, synthetic construct
KESD

SEQ ID NO: 5612 - protein, 4 aa, synthetic construct
KTIK

SEQ ID NO: 5613 - protein, 4 aa, synthetic construct
KTDL

SEQ ID NO: 5614 - protein, 4 aa, synthetic construct
KTVP

SEQ ID NO: 5615 - protein, 4 aa, synthetic construct
KTVI

SEQ ID NO: 5616 - protein, 4 aa, synthetic construct
KAEH

SEQ ID NO: 5617 - protein, 4 aa, synthetic construct
KNCL

SEQ ID NO: 5618 - protein, 4 aa, synthetic construct
KTVK

SEQ ID NO: 5619 - protein, 4 aa, synthetic construct
KNAD

SEQ ID NO: 5620 - protein, 4 aa, synthetic construct
KTIT

SEQ ID NO: 5621 - protein, 4 aa, synthetic construct
KNCV

SEQ ID NO: 5622 - protein, 4 aa, synthetic construct
KNAL

SEQ ID NO: 5623 - protein, 4 aa, synthetic construct
KVIN

SEQ ID NO: 5624 - protein, 4 aa, synthetic construct
KTEF

SEQ ID NO: 5625 - protein, 4 aa, synthetic construct
KTRE

SEQ ID NO: 5626 - protein, 4 aa, synthetic construct
KQGE

SEQ ID NO: 5627 - protein, 4 aa, synthetic construct
KSEK

SEQ ID NO: 5628 - protein, 4 aa, synthetic construct
KNVN

SEQ ID NO: 5629 - protein, 4 aa, synthetic construct
KGGE

SEQ ID NO: 5630 - protein, 4 aa, synthetic construct
KEFV

SEQ ID NO: 5631 - protein, 4 aa, synthetic construct
KSDK

SEQ ID NO: 5632 - protein, 4 aa, synthetic construct
KTEQ

SEQ ID NO: 5633 - protein, 4 aa, synthetic construct
KEVQ

SEQ ID NO: 5634 - protein, 4 aa, synthetic construct
KTEY

SEQ ID NO: 5635 - protein, 4 aa, synthetic construct
KNCW

SEQ ID NO: 5636 - protein, 4 aa, synthetic construct
KTDV

SEQ ID NO: 5637 - protein, 4 aa, synthetic construct
KSDI

SEQ ID NO: 5638 - protein, 4 aa, synthetic construct
KNSI

SEQ ID NO: 5639 - protein, 4 aa, synthetic construct
KNSL

SEQ ID NO: 5640 - protein, 4 aa, synthetic construct
KEVV

SEQ ID NO: 5641 - protein, 4 aa, synthetic construct
KTEP

SEQ ID NO: 5642 - protein, 4 aa, synthetic construct
KSEL

SEQ ID NO: 5643 - protein, 4 aa, synthetic construct
KTWQ

SEQ ID NO: 5644 - protein, 4 aa, synthetic construct
KTEV

SEQ ID NO: 5645 - protein, 4 aa, synthetic construct
KAVN

SEQ ID NO: 5646 - protein, 4 aa, synthetic construct
KGVL

SEQ ID NO: 5647 - protein, 4 aa, synthetic construct
KTEG

SEQ ID NO: 5648 - protein, 4 aa, synthetic construct
KTRD

SEQ ID NO: 5649 - protein, 4 aa, synthetic construct
KTGN

SEQ ID NO: 5650 - protein, 4 aa, synthetic construct
KNAI

SEQ ID NO: 5651 - protein, 4 aa, synthetic construct
KAEN

SEQ ID NO: 5652 - protein, 4 aa, synthetic construct
KAET

SEQ ID NO: 5653 - protein, 4 aa, synthetic construct
KTVH

SEQ ID NO: 5654 - protein, 4 aa, synthetic construct
KETA

SEQ ID NO: 5655 - protein, 4 aa, synthetic construct
KNNL

SEQ ID NO: 5656 - protein, 4 aa, synthetic construct
EAIN

SEQ ID NO: 5657 - protein, 4 aa, synthetic construct
KSLN

SEQ ID NO: 5658 - protein, 4 aa, synthetic construct
KTIP

SEQ ID NO: 5659 - protein, 4 aa, synthetic construct
KTIH

SEQ ID NO: 5660 - protein, 18 aa, synthetic construct
KTINGSGSPHSKAQNQQT

SEQ ID NO: 5661 - protein, 5 aa, synthetic construct
NPHKS

SEQ ID NO: 5662 - protein, 6 aa, synthetic construct
NPHKSG

SEQ ID NO: 5663 - protein, 6 aa, synthetic construct
SPHKIV

SEQ ID NO: 5664 - protein, 6 aa, synthetic construct
GHDNPH

SEQ ID NO: 5665 - protein, 6 aa, synthetic construct
AHDSPH

SEQ ID NO: 5666 - protein, 6 aa, synthetic construct
KHDSPH

SEQ ID NO: 5667 - protein, 6 aa, synthetic construct
WHDSPH

SEQ ID NO: 5668 - protein, 6 aa, synthetic construct
RHDSPH

SEQ ID NO: 5669 - protein, 6 aa, synthetic construct
LHDSPH

SEQ ID NO: 5670 - protein, 6 aa, synthetic construct
IHDSPH

SEQ ID NO: 5671 - protein, 6 aa, synthetic construct
MHDSPH

SEQ ID NO: 5672 - protein, 6 aa, synthetic construct
NHDSPH

SEQ ID NO: 5673 - protein, 6 aa, synthetic construct
THDSPH

SEQ ID NO: 5674 - protein, 6 aa, synthetic construct
EHDSPH

SEQ ID NO: 5675 - protein, 6 aa, synthetic construct
QHDSPH

SEQ ID NO: 5676 - protein, 6 aa, synthetic construct
YHDSPH

SEQ ID NO: 5677 - protein, 6 aa, synthetic construct
HHDSPH

SEQ ID NO: 5678 - protein, 6 aa, synthetic construct
FHDSPH

SEQ ID NO: 5679 - protein, 6 aa, synthetic construct
VHDSPH

SEQ ID NO: 5680 - protein, 9 aa, synthetic construct
GHDNPHKSG

SEQ ID NO: 5681 - protein, 9 aa, synthetic construct
AHDSPHKSG

SEQ ID NO: 5682 - protein, 9 aa, synthetic construct
AHDSPHKIG

SEQ ID NO: 5683 - protein, 9 aa, synthetic construct
KHDSPHKSG

SEQ ID NO: 5684 - protein, 9 aa, synthetic construct
WHDSPHKSG

SEQ ID NO: 5685 - protein, 9 aa, synthetic construct
RHDSPHKSG

SEQ ID NO: 5686 - protein, 9 aa, synthetic construct
LHDSPHKSG

SEQ ID NO: 5687 - protein, 9 aa, synthetic construct
IHDSPHKSG

SEQ ID NO: 5688 - protein, 9 aa, synthetic construct
MHDSPHKSG

SEQ ID NO: 5689 - protein, 9 aa, synthetic construct
NHDSPHKSG

SEQ ID NO: 5690 - protein, 9 aa, synthetic construct
THDSPHKSG

SEQ ID NO: 5691 - protein, 9 aa, synthetic construct
EHDSPHKSG

SEQ ID NO: 5692 - protein, 9 aa, synthetic construct
QHDSPHKSG

SEQ ID NO: 5693 - protein, 9 aa, synthetic construct
RHDSPHKIV

SEQ ID NO: 5694 - protein, 9 aa, synthetic construct
YHDSPHKSG

SEQ ID NO: 5695 - protein, 9 aa, synthetic construct
HHDSPHKSG

SEQ ID NO: 5696 - protein, 9 aa, synthetic construct
FHDSPHKSG

SEQ ID NO: 5697 - protein, 9 aa, synthetic construct
VHDSPHKSG

SEQ ID NO: 5698 - protein, 5 aa, synthetic construct
QIRQT

SEQ ID NO: 5699 - protein, 5 aa, synthetic construct
QNQHA

SEQ ID NO: 5700 - protein, 5 aa, synthetic construct
QSVQT

SEQ ID NO: 5701 - protein, 5 aa, synthetic construct
RSQQT

SEQ ID NO: 5702 - protein, 5 aa, synthetic construct
QNKLE

SEQ ID NO: 5703 - protein, 5 aa, synthetic construct
QNQQK

SEQ ID NO: 5704 - protein, 5 aa, synthetic construct
QHQQA

SEQ ID NO: 5705 - protein, 5 aa, synthetic construct
QIQHT

SEQ ID NO: 5706 - protein, 5 aa, synthetic construct
PRQQT

SEQ ID NO: 5707 - protein, 5 aa, synthetic construct
HTQQT

SEQ ID NO: 5708 - protein, 5 aa, synthetic construct
QRQHT

SEQ ID NO: 5709 - protein, 5 aa, synthetic construct
QNQQS

SEQ ID NO: 5710 - protein, 5 aa, synthetic construct
RNQET

SEQ ID NO: 5711 - protein, 5 aa, synthetic construct
KNQQT

SEQ ID NO: 5712 - protein, 5 aa, synthetic construct
QTQQT

SEQ ID NO: 5713 - protein, 5 aa, synthetic construct
QTQQI

SEQ ID NO: 5714 - protein, 5 aa, synthetic construct
QSKQA

SEQ ID NO: 5715 - protein, 5 aa, synthetic construct
QNQPP

SEQ ID NO: 5716 - protein, 5 aa, synthetic construct
QSPQT

SEQ ID NO: 5717 - protein, 5 aa, synthetic construct
QNQQG

SEQ ID NO: 5718 - protein, 5 aa, synthetic construct
QNQHT

SEQ ID NO: 5719 - protein, 5 aa, synthetic construct
QTRQT

SEQ ID NO: 5720 - protein, 5 aa, synthetic construct
QNLHT

SEQ ID NO: 5721 - protein, 5 aa, synthetic construct
QNQET

SEQ ID NO: 5722 - protein, 5 aa, synthetic construct
LNQPT

SEQ ID NO: 5723 - protein, 5 aa, synthetic construct
QNQDT

SEQ ID NO: 5724 - protein, 5 aa, synthetic construct
RNQQT

SEQ ID NO: 5725 - protein, 5 aa, synthetic construct
QNLLT

SEQ ID NO: 5726 - protein, 5 aa, synthetic construct
QLVIT

SEQ ID NO: 5727 - protein, 5 aa, synthetic construct
RTQET

SEQ ID NO: 5728 - protein, 5 aa, synthetic construct
QTHQT

SEQ ID NO: 5729 - protein, 5 aa, synthetic construct
QNQPA

SEQ ID NO: 5730 - protein, 5 aa, synthetic construct
QDQHT

SEQ ID NO: 5731 - protein, 5 aa, synthetic construct
QSQHT

SEQ ID NO: 5732 - protein, 5 aa, synthetic construct
RNQQI

SEQ ID NO: 5733 - protein, 5 aa, synthetic construct
VRQQT

SEQ ID NO: 5734 - protein, 5 aa, synthetic construct
QNQHS

SEQ ID NO: 5735 - protein, 5 aa, synthetic construct
AWQQT

SEQ ID NO: 5736 - protein, 5 aa, synthetic construct
QSVPT

SEQ ID NO: 5737 - protein, 5 aa, synthetic construct
QNIQP

SEQ ID NO: 5738 - protein, 5 aa, synthetic construct
QNHLN

SEQ ID NO: 5739 - protein, 5 aa, synthetic construct
LDQQT

SEQ ID NO: 5740 - protein, 5 aa, synthetic construct
PDQQS

SEQ ID NO: 5741 - protein, 5 aa, synthetic construct
ESQQT

SEQ ID NO: 5742 - protein, 5 aa, synthetic construct
QNKQT

SEQ ID NO: 5743 - protein, 5 aa, synthetic construct
QRQLT

SEQ ID NO: 5744 - protein, 5 aa, synthetic construct
QIIVT

SEQ ID NO: 5745 - protein, 5 aa, synthetic construct
QKQST

SEQ ID NO: 5746 - protein, 5 aa, synthetic construct
QSHQT

SEQ ID NO: 5747 - protein, 5 aa, synthetic construct
QFVVT

SEQ ID NO: 5748 - protein, 5 aa, synthetic construct
QSQPT

SEQ ID NO: 5749 - protein, 5 aa, synthetic construct
QNEQT

SEQ ID NO: 5750 - protein, 5 aa, synthetic construct
RNRQT

SEQ ID NO: 5751 - protein, 5 aa, synthetic construct
QSKQT

SEQ ID NO: 5752 - protein, 5 aa, synthetic construct
QNPLT

SEQ ID NO: 5753 - protein, 5 aa, synthetic construct
RDQKT

SEQ ID NO: 5754 - protein, 5 aa, synthetic construct
HNQQN

SEQ ID NO: 5755 - protein, 5 aa, synthetic construct
QWKRT

SEQ ID NO: 5756 - protein, 5 aa, synthetic construct
QNHQI

SEQ ID NO: 5757 - protein, 5 aa, synthetic construct
QNQQA

SEQ ID NO: 5758 - protein, 5 aa, synthetic construct
QNQLN

SEQ ID NO: 5759 - protein, 5 aa, synthetic construct
QTQPT

SEQ ID NO: 5760 - protein, 5 aa, synthetic construct
QKQLT

SEQ ID NO: 5761 - protein, 5 aa, synthetic construct
RNQLA

SEQ ID NO: 5762 - protein, 5 aa, synthetic construct
RNQQS

SEQ ID NO: 5763 - protein, 5 aa, synthetic construct
ISIQT

SEQ ID NO: 5764 - protein, 5 aa, synthetic construct
QNQQN

SEQ ID NO: 5765 - protein, 5 aa, synthetic construct
QSQQS

SEQ ID NO: 5766 - protein, 5 aa, synthetic construct
QTVCT

SEQ ID NO: 5767 - protein, 5 aa, synthetic construct
QYQQI

SEQ ID NO: 5768 - protein, 5 aa, synthetic construct
QQIMT

SEQ ID NO: 5769 - protein, 5 aa, synthetic construct
QNEQS

SEQ ID NO: 5770 - protein, 5 aa, synthetic construct
LNHQT

SEQ ID NO: 5771 - protein, 5 aa, synthetic construct
QMIHT

SEQ ID NO: 5772 - protein, 5 aa, synthetic construct
RNHQS

SEQ ID NO: 5773 - protein, 5 aa, synthetic construct
QKMNT

SEQ ID NO: 5774 - protein, 5 aa, synthetic construct
QSQQN

SEQ ID NO: 5775 - protein, 4 aa, synthetic construct
KSIY

SEQ ID NO: 5776 - protein, 4 aa, synthetic construct
KIIN

SEQ ID NO: 5777 - protein, 4 aa, synthetic construct
KAII

SEQ ID NO: 5778 - protein, 4 aa, synthetic construct
KAIS

SEQ ID NO: 5779 - protein, 4 aa, synthetic construct
KTVD

SEQ ID NO: 5780 - protein, 4 aa, synthetic construct
KTIE

SEQ ID NO: 5781 - protein, 4 aa, synthetic construct
KTIY

SEQ ID NO: 5782 - protein, 4 aa, synthetic construct
KNVV

SEQ ID NO: 5783 - protein, 4 aa, synthetic construct
KTDA

SEQ ID NO: 5784 - protein, 4 aa, synthetic construct
KTEM

SEQ ID NO: 5785 - protein, 4 aa, synthetic construct
KIVN

SEQ ID NO: 5786 - protein, 4 aa, synthetic construct
KIGN

SEQ ID NO: 5787 - protein, 4 aa, synthetic construct
KEVM

SEQ ID NO: 5788 - protein, 4 aa, synthetic construct
KYQV

SEQ ID NO: 5789 - protein, 4 aa, synthetic construct
KTVE

SEQ ID NO: 5790 - protein, 4 aa, synthetic construct
KAID

SEQ ID NO: 5791 - protein, 4 aa, synthetic construct
KTIM

SEQ ID NO: 5792 - protein, 4 aa, synthetic construct
KEVG

SEQ ID NO: 5793 - protein, 4 aa, synthetic construct
KSEM

SEQ ID NO: 5794 - protein, 4 aa, synthetic construct
KAQQ

SEQ ID NO: 5795 - protein, 4 aa, synthetic construct
KCGE

SEQ ID NO: 5796 - protein, 4 aa, synthetic construct
KASN

SEQ ID NO: 5797 - protein, 4 aa, synthetic construct
KTIG

SEQ ID NO: 5798 - protein, 4 aa, synthetic construct
KTDP

SEQ ID NO: 5799 - protein, 4 aa, synthetic construct
KELV

SEQ ID NO: 5800 - protein, 4 aa, synthetic construct
KELM

SEQ ID NO: 5801 - protein, 4 aa, synthetic construct
KNEI

SEQ ID NO: 5802 - protein, 4 aa, synthetic construct
KTPN

SEQ ID NO: 5803 - protein, 4 aa, synthetic construct
KITN

SEQ ID NO: 5804 - protein, 4 aa, synthetic construct
KTDI

SEQ ID NO: 5805 - protein, 4 aa, synthetic construct
KTDQ

SEQ ID NO: 5806 - protein, 4 aa, synthetic construct
KGIN

SEQ ID NO: 5807 - protein, 4 aa, synthetic construct
KSEI

SEQ ID NO: 5808 - protein, 4 aa, synthetic construct
KWSA

SEQ ID NO: 5809 - protein, 4 aa, synthetic construct
KELA

SEQ ID NO: 5810 - protein, 4 aa, synthetic construct
KQTQ

SEQ ID NO: 5811 - protein, 4 aa, synthetic construct
KGAD

SEQ ID NO: 5812 - protein, 4 aa, synthetic construct
KVGE

SEQ ID NO: 5813 - protein, 4 aa, synthetic construct
KANE

SEQ ID NO: 5814 - protein, 4 aa, synthetic construct
KTDT

SEQ ID NO: 5815 - protein, 4 aa, synthetic construct
KTCI

SEQ ID NO: 5816 - protein, 4 aa, synthetic construct
KELR

SEQ ID NO: 5817 - protein, 4 aa, synthetic construct
KCQI

SEQ ID NO: 5818 - protein, 4 aa, synthetic construct
KGVM

SEQ ID NO: 5819 - protein, 4 aa, synthetic construct
KACD

SEQ ID NO: 5820 - protein, 4 aa, synthetic construct
KNEL

SEQ ID NO: 5821 - protein, 4 aa, synthetic construct
KAAE

SEQ ID NO: 5822 - protein, 4 aa, synthetic construct
KGQN

SEQ ID NO: 5823 - protein, 4 aa, synthetic construct
KNEF

SEQ ID NO: 5824 - protein, 4 aa, synthetic construct
KTSI

SEQ ID NO: 5825 - protein, 4 aa, synthetic construct
KCDQ

SEQ ID NO: 5826 - protein, 4 aa, synthetic construct
KEIL

SEQ ID NO: 5827 - protein, 4 aa, synthetic construct
KTPD

SEQ ID NO: 5828 - protein, 18 aa, synthetic construct
KTINGHDSPHKSGQNQQT

SEQ ID NO: 5829 - protein, 4 aa, synthetic construct
SKAQ

SEQ ID NO: 5830 - protein, 4 aa, synthetic construct
SMYM

SEQ ID NO: 5831 - protein, 4 aa, synthetic construct
SKAF

SEQ ID NO: 5832 - protein, 4 aa, synthetic construct
SKLK

SEQ ID NO: 5833 - protein, 4 aa, synthetic construct
SKRH

SEQ ID NO: 5834 - protein, 4 aa, synthetic construct
SKWR

SEQ ID NO: 5835 - protein, 4 aa, synthetic construct
SRCR

SEQ ID NO: 5836 - protein, 4 aa, synthetic construct
SFTC

SEQ ID NO: 5837 - protein, 4 aa, synthetic construct
SKFF

SEQ ID NO: 5838 - protein, 4 aa, synthetic construct
IVWQ

SEQ ID NO: 5839 - protein, 4 aa, synthetic construct
SKYF

SEQ ID NO: 5840 - protein, 4 aa, synthetic construct
SKAR

SEQ ID NO: 5841 - protein, 4 aa, synthetic construct
SCHQ

SEQ ID NO: 5842 - protein, 4 aa, synthetic construct
FPWQ

SEQ ID NO: 5843 - protein, 4 aa, synthetic construct
SKIR

SEQ ID NO: 5844 - protein, 4 aa, synthetic construct
VYYQ

SEQ ID NO: 5845 - protein, 4 aa, synthetic construct
SLYW

SEQ ID NO: 5846 - protein, 4 aa, synthetic construct
SKPK

SEQ ID NO: 5847 - protein, 4 aa, synthetic construct
SRFW

SEQ ID NO: 5848 - protein, 4 aa, synthetic construct
SRMR

SEQ ID NO: 5849 - protein, 4 aa, synthetic construct
SVKK

SEQ ID NO: 5850 - protein, 4 aa, synthetic construct
SWAP

SEQ ID NO: 5851 - protein, 4 aa, synthetic construct
SLWK

SEQ ID NO: 5852 - protein, 4 aa, synthetic construct
SFRP

SEQ ID NO: 5853 - protein, 4 aa, synthetic construct
SKKV

SEQ ID NO: 5854 - protein, 4 aa, synthetic construct
SYAF

SEQ ID NO: 5855 - protein, 4 aa, synthetic construct
SKAC

SEQ ID NO: 5856 - protein, 4 aa, synthetic construct
SKRL

SEQ ID NO: 5857 - protein, 4 aa, synthetic construct
SCSR

SEQ ID NO: 5858 - protein, 4 aa, synthetic construct
SRCP

SEQ ID NO: 5859 - protein, 4 aa, synthetic construct
SGAC

SEQ ID NO: 5860 - protein, 4 aa, synthetic construct
SKFR

SEQ ID NO: 5861 - protein, 4 aa, synthetic construct
SFPF

SEQ ID NO: 5862 - protein, 4 aa, synthetic construct
SFFG

SEQ ID NO: 5863 - protein, 4 aa, synthetic construct
SMCQ

SEQ ID NO: 5864 - protein, 4 aa, synthetic construct
SKLF

SEQ ID NO: 5865 - protein, 4 aa, synthetic construct
SKTR

SEQ ID NO: 5866 - protein, 4 aa, synthetic construct
SGKR

SEQ ID NO: 5867 - protein, 4 aa, synthetic construct
FYRQ

SEQ ID NO: 5868 - protein, 4 aa, synthetic construct
CRVQ

SEQ ID NO: 5869 - protein, 4 aa, synthetic construct
YGIQ

SEQ ID NO: 5870 - protein, 4 aa, synthetic construct
VNCQ

SEQ ID NO: 5871 - protein, 4 aa, synthetic construct
SKPF

SEQ ID NO: 5872 - protein, 4 aa, synthetic construct
SLAW

SEQ ID NO: 5873 - protein, 4 aa, synthetic construct
SKRS

SEQ ID NO: 5874 - protein, 4 aa, synthetic construct
WSYQ

SEQ ID NO: 5875 - protein, 4 aa, synthetic construct
RWLQ

SEQ ID NO: 5876 - protein, 4 aa, synthetic construct
PSCQ

SEQ ID NO: 5877 - protein, 4 aa, synthetic construct
SSWL

SEQ ID NO: 5878 - protein, 4 aa, synthetic construct
SKRR

SEQ ID NO: 5879 - protein, 4 aa, synthetic construct
SKGC

SEQ ID NO: 5880 - protein, 4 aa, synthetic construct
VPWQ

SEQ ID NO: 5881 - protein, 4 aa, synthetic construct
SKRY

SEQ ID NO: 5882 - protein, 4 aa, synthetic construct
SGCQ

SEQ ID NO: 5883 - protein, 4 aa, synthetic construct
SFTP

SEQ ID NO: 5884 - protein, 4 aa, synthetic construct
STTC

SEQ ID NO: 5885 - protein, 4 aa, synthetic construct
PKRQ

SEQ ID NO: 5886 - protein, 4 aa, synthetic construct
SKCF

SEQ ID NO: 5887 - protein, 4 aa, synthetic construct
WVPQ

SEQ ID NO: 5888 - protein, 4 aa, synthetic construct
SFWS

SEQ ID NO: 5889 - protein, 4 aa, synthetic construct
SKFK

SEQ ID NO: 5890 - protein, 4 aa, synthetic construct
RIKQ

SEQ ID NO: 5891 - protein, 4 aa, synthetic construct
SKAP

SEQ ID NO: 5892 - protein, 4 aa, synthetic construct
SFRY

SEQ ID NO: 5893 - protein, 4 aa, synthetic construct
SKMI

SEQ ID NO: 5894 - protein, 4 aa, synthetic construct
LRWQ

SEQ ID NO: 5895 - protein, 4 aa, synthetic construct
LPTQ

SEQ ID NO: 5896 - protein, 4 aa, synthetic construct
SKWK

SEQ ID NO: 5897 - protein, 4 aa, synthetic construct
SYMR

SEQ ID NO: 5898 - protein, 4 aa, synthetic construct
SKAA

SEQ ID NO: 5899 - protein, 4 aa, synthetic construct
LLCQ

SEQ ID NO: 5900 - protein, 4 aa, synthetic construct
RCCQ

SEQ ID NO: 5901 - protein, 4 aa, synthetic construct
LCVQ

SEQ ID NO: 5902 - protein, 4 aa, synthetic construct
SKLT

SEQ ID NO: 5903 - protein, 4 aa, synthetic construct
SKLC

SEQ ID NO: 5904 - protein, 4 aa, synthetic construct
SYLV

SEQ ID NO: 5905 - protein, 4 aa, synthetic construct
QGCQ

SEQ ID NO: 5906 - protein, 4 aa, synthetic construct
MAFQ

SEQ ID NO: 5907 - protein, 4 aa, synthetic construct
SKWG

SEQ ID NO: 5908 - protein, 4 aa, synthetic construct
SKIL

SEQ ID NO: 5909 - protein, 4 aa, synthetic construct
SFQI

SEQ ID NO: 5910 - protein, 4 aa, synthetic construct
SKAL

SEQ ID NO: 5911 - protein, 4 aa, synthetic construct
SKAH

SEQ ID NO: 5912 - protein, 4 aa, synthetic construct
SLCL

SEQ ID NO: 5913 - protein, 4 aa, synthetic construct
RPWQ

SEQ ID NO: 5914 - protein, 4 aa, synthetic construct
RPRQ

SEQ ID NO: 5915 - protein, 4 aa, synthetic construct
SCPQ

SEQ ID NO: 5916 - protein, 4 aa, synthetic construct
SVRY

SEQ ID NO: 5917 - protein, 4 aa, synthetic construct
SVRC

SEQ ID NO: 5918 - protein, 4 aa, synthetic construct
SKMP

SEQ ID NO: 5919 - protein, 4 aa, synthetic construct
SKKT

SEQ ID NO: 5920 - protein, 4 aa, synthetic construct
SLPY

SEQ ID NO: 5921 - protein, 4 aa, synthetic construct
VYHQ

SEQ ID NO: 5922 - protein, 4 aa, synthetic construct
SYTR

SEQ ID NO: 5923 - protein, 4 aa, synthetic construct
LVYQ

SEQ ID NO: 5924 - protein, 4 aa, synthetic construct
YRYQ

SEQ ID NO: 5925 - protein, 4 aa, synthetic construct
SWLK

SEQ ID NO: 5926 - protein, 4 aa, synthetic construct
CPAQ

SEQ ID NO: 5927 - protein, 4 aa, synthetic construct
SMCT

SEQ ID NO: 5928 - protein, 4 aa, synthetic construct
SPPD

SEQ ID NO: 5929 - protein, 4 aa, synthetic construct
SKRN

SEQ ID NO: 5930 - protein, 4 aa, synthetic construct
RWTQ

SEQ ID NO: 5931 - protein, 4 aa, synthetic construct
PRKQ

SEQ ID NO: 5932 - protein, 4 aa, synthetic construct
SKCS

SEQ ID NO: 5933 - protein, 4 aa, synthetic construct
PFVQ

SEQ ID NO: 5934 - protein, 4 aa, synthetic construct
SKLP

SEQ ID NO: 5935 - protein, 4 aa, synthetic construct
SKSE

SEQ ID NO: 5936 - protein, 4 aa, synthetic construct
WVAQ

SEQ ID NO: 5937 - protein, 4 aa, synthetic construct
SLYQ

SEQ ID NO: 5938 - protein, 4 aa, synthetic construct
SKVR

SEQ ID NO: 5939 - protein, 4 aa, synthetic construct
CALQ

SEQ ID NO: 5940 - protein, 4 aa, synthetic construct
SSCT

SEQ ID NO: 5941 - protein, 4 aa, synthetic construct
SKNS

SEQ ID NO: 5942 - protein, 4 aa, synthetic construct
SKRK

SEQ ID NO: 5943 - protein, 4 aa, synthetic construct
LCTQ

SEQ ID NO: 5944 - protein, 4 aa, synthetic construct
STCL

SEQ ID NO: 5945 - protein, 4 aa, synthetic construct
SYAR

SEQ ID NO: 5946 - protein, 4 aa, synthetic construct
SKQR

SEQ ID NO: 5947 - protein, 4 aa, synthetic construct
SKRV

SEQ ID NO: 5948 - protein, 4 aa, synthetic construct
KSGQ

SEQ ID NO: 5949 - protein, 4 aa, synthetic construct
SYYS

SEQ ID NO: 5950 - protein, 4 aa, synthetic construct
SLTC

SEQ ID NO: 5951 - protein, 4 aa, synthetic construct
SCQS

SEQ ID NO: 5952 - protein, 4 aa, synthetic construct
SKAK

SEQ ID NO: 5953 - protein, 4 aa, synthetic construct
SKPQ

SEQ ID NO: 5954 - protein, 4 aa, synthetic construct
FPFQ

SEQ ID NO: 5955 - protein, 4 aa, synthetic construct
SKCT

SEQ ID NO: 5956 - protein, 4 aa, synthetic construct
SVFE

SEQ ID NO: 5957 - protein, 4 aa, synthetic construct
GRYQ

SEQ ID NO: 5958 - protein, 4 aa, synthetic construct
KAQA

SEQ ID NO: 5959 - protein, 4 aa, synthetic construct
KAQN

SEQ ID NO: 5960 - protein, 4 aa, synthetic construct
MYMN

SEQ ID NO: 5961 - protein, 4 aa, synthetic construct
KAFY

SEQ ID NO: 5962 - protein, 4 aa, synthetic construct
KLKR

SEQ ID NO: 5963 - protein, 4 aa, synthetic construct
KRHR

SEQ ID NO: 5964 - protein, 4 aa, synthetic construct
KAQK

SEQ ID NO: 5965 - protein, 4 aa, synthetic construct
KWRL

SEQ ID NO: 5966 - protein, 4 aa, synthetic construct
RCRN

SEQ ID NO: 5967 - protein, 4 aa, synthetic construct
FTCN

SEQ ID NO: 5968 - protein, 4 aa, synthetic construct
KFFI

SEQ ID NO: 5969 - protein, 4 aa, synthetic construct
KAQY

SEQ ID NO: 5970 - protein, 4 aa, synthetic construct
VWQN

SEQ ID NO: 5971 - protein, 4 aa, synthetic construct
KYFM

SEQ ID NO: 5972 - protein, 4 aa, synthetic construct
KARQ

SEQ ID NO: 5973 - protein, 4 aa, synthetic construct
CHQN

SEQ ID NO: 5974 - protein, 4 aa, synthetic construct
PWQN

SEQ ID NO: 5975 - protein, 4 aa, synthetic construct
KIRR

SEQ ID NO: 5976 - protein, 4 aa, synthetic construct
YYQN

SEQ ID NO: 5977 - protein, 4 aa, synthetic construct
LYWN

SEQ ID NO: 5978 - protein, 4 aa, synthetic construct
KPKR

SEQ ID NO: 5979 - protein, 4 aa, synthetic construct
KAFS

SEQ ID NO: 5980 - protein, 4 aa, synthetic construct
RFWN

SEQ ID NO: 5981 - protein, 4 aa, synthetic construct
KAQC

SEQ ID NO: 5982 - protein, 4 aa, synthetic construct
RMRN

SEQ ID NO: 5983 - protein, 4 aa, synthetic construct
VKKN

SEQ ID NO: 5984 - protein, 4 aa, synthetic construct
WAPN

SEQ ID NO: 5985 - protein, 4 aa, synthetic construct
LWKN

SEQ ID NO: 5986 - protein, 4 aa, synthetic construct
KARW

SEQ ID NO: 5987 - protein, 4 aa, synthetic construct
FRPN

SEQ ID NO: 5988 - protein, 4 aa, synthetic construct
KKVF

SEQ ID NO: 5989 - protein, 4 aa, synthetic construct
YAFN

SEQ ID NO: 5990 - protein, 4 aa, synthetic construct
KACS

SEQ ID NO: 5991 - protein, 4 aa, synthetic construct
KRLW

SEQ ID NO: 5992 - protein, 4 aa, synthetic construct
CSRN

SEQ ID NO: 5993 - protein, 4 aa, synthetic construct
RCPN

SEQ ID NO: 5994 - protein, 4 aa, synthetic construct
GACN

SEQ ID NO: 5995 - protein, 4 aa, synthetic construct
KFRQ

SEQ ID NO: 5996 - protein, 4 aa, synthetic construct
FPFN

SEQ ID NO: 5997 - protein, 4 aa, synthetic construct
FFGN

SEQ ID NO: 5998 - protein, 4 aa, synthetic construct
MCQN

SEQ ID NO: 5999 - protein, 4 aa, synthetic construct
KLFW

SEQ ID NO: 6000 - protein, 4 aa, synthetic construct
KTRK

SEQ ID NO: 6001 - protein, 4 aa, synthetic construct
GKRN

SEQ ID NO: 6002 - protein, 4 aa, synthetic construct
YRQN

SEQ ID NO: 6003 - protein, 4 aa, synthetic construct
RVQN

SEQ ID NO: 6004 - protein, 4 aa, synthetic construct
GIQN

SEQ ID NO: 6005 - protein, 4 aa, synthetic construct
KAQR

SEQ ID NO: 6006 - protein, 4 aa, synthetic construct
NCQN

SEQ ID NO: 6007 - protein, 4 aa, synthetic construct
KPFR

SEQ ID NO: 6008 - protein, 4 aa, synthetic construct
LAWN

SEQ ID NO: 6009 - protein, 4 aa, synthetic construct
KRSY

SEQ ID NO: 6010 - protein, 4 aa, synthetic construct
SYQN

SEQ ID NO: 6011 - protein, 4 aa, synthetic construct
WLQN

SEQ ID NO: 6012 - protein, 4 aa, synthetic construct
SCQN

SEQ ID NO: 6013 - protein, 4 aa, synthetic construct
SWLN

SEQ ID NO: 6014 - protein, 4 aa, synthetic construct
KRRA

SEQ ID NO: 6015 - protein, 4 aa, synthetic construct
KAQT

SEQ ID NO: 6016 - protein, 4 aa, synthetic construct
KGCT

SEQ ID NO: 6017 - protein, 4 aa, synthetic construct
KRYT

SEQ ID NO: 6018 - protein, 4 aa, synthetic construct
GCQN

SEQ ID NO: 6019 - protein, 4 aa, synthetic construct
FTPN

SEQ ID NO: 6020 - protein, 4 aa, synthetic construct
TTCN

SEQ ID NO: 6021 - protein, 4 aa, synthetic construct
KARM

SEQ ID NO: 6022 - protein, 4 aa, synthetic construct
KRQN

SEQ ID NO: 6023 - protein, 4 aa, synthetic construct
KCFL

SEQ ID NO: 6024 - protein, 4 aa, synthetic construct
VPQN

SEQ ID NO: 6025 - protein, 4 aa, synthetic construct
FWSN

SEQ ID NO: 6026 - protein, 4 aa, synthetic construct
KFKN

SEQ ID NO: 6027 - protein, 4 aa, synthetic construct
IKQN

SEQ ID NO: 6028 - protein, 4 aa, synthetic construct
KAPR

SEQ ID NO: 6029 - protein, 4 aa, synthetic construct
FRYN

SEQ ID NO: 6030 - protein, 4 aa, synthetic construct
KMIC

SEQ ID NO: 6031 - protein, 4 aa, synthetic construct
RWQN

SEQ ID NO: 6032 - protein, 4 aa, synthetic construct
PTQN

SEQ ID NO: 6033 - protein, 4 aa, synthetic construct
KWKS

SEQ ID NO: 6034 - protein, 4 aa, synthetic construct
YMRN

SEQ ID NO: 6035 - protein, 4 aa, synthetic construct
KAAR

SEQ ID NO: 6036 - protein, 4 aa, synthetic construct
LCQN

SEQ ID NO: 6037 - protein, 4 aa, synthetic construct
CCQN

SEQ ID NO: 6038 - protein, 4 aa, synthetic construct
CVQN

SEQ ID NO: 6039 - protein, 4 aa, synthetic construct
KLTR

SEQ ID NO: 6040 - protein, 4 aa, synthetic construct
KLCT

SEQ ID NO: 6041 - protein, 4 aa, synthetic construct
KIRG

SEQ ID NO: 6042 - protein, 4 aa, synthetic construct
YLVN

SEQ ID NO: 6043 - protein, 4 aa, synthetic construct
AFQN

SEQ ID NO: 6044 - protein, 4 aa, synthetic construct
KACQ

SEQ ID NO: 6045 - protein, 4 aa, synthetic construct
KWGL

SEQ ID NO: 6046 - protein, 4 aa, synthetic construct
KILR

SEQ ID NO: 6047 - protein, 4 aa, synthetic construct
FQIN

SEQ ID NO: 6048 - protein, 4 aa, synthetic construct
KACI

SEQ ID NO: 6049 - protein, 4 aa, synthetic construct
KALR

SEQ ID NO: 6050 - protein, 4 aa, synthetic construct
KAHA

SEQ ID NO: 6051 - protein, 4 aa, synthetic construct
LCLN

SEQ ID NO: 6052 - protein, 4 aa, synthetic construct
KAFV

SEQ ID NO: 6053 - protein, 4 aa, synthetic construct
PRQN

SEQ ID NO: 6054 - protein, 4 aa, synthetic construct
CPQN

SEQ ID NO: 6055 - protein, 4 aa, synthetic construct
KAQF

SEQ ID NO: 6056 - protein, 4 aa, synthetic construct
VRYN

SEQ ID NO: 6057 - protein, 4 aa, synthetic construct
VRCN

SEQ ID NO: 6058 - protein, 4 aa, synthetic construct
KMPC

SEQ ID NO: 6059 - protein, 4 aa, synthetic construct
KKTS

SEQ ID NO: 6060 - protein, 4 aa, synthetic construct
LPYN

SEQ ID NO: 6061 - protein, 4 aa, synthetic construct
YHQN

SEQ ID NO: 6062 - protein, 4 aa, synthetic construct
KAQS

SEQ ID NO: 6063 - protein, 4 aa, synthetic construct
YTRN

SEQ ID NO: 6064 - protein, 4 aa, synthetic construct
VYQN

SEQ ID NO: 6065 - protein, 4 aa, synthetic construct
RYQN

SEQ ID NO: 6066 - protein, 4 aa, synthetic construct
WLKN

SEQ ID NO: 6067 - protein, 4 aa, synthetic construct
KAQM

SEQ ID NO: 6068 - protein, 4 aa, synthetic construct
PAQN

SEQ ID NO: 6069 - protein, 4 aa, synthetic construct
MCTN

SEQ ID NO: 6070 - protein, 4 aa, synthetic construct
PPDN

SEQ ID NO: 6071 - protein, 4 aa, synthetic construct
KRNY

SEQ ID NO: 6072 - protein, 4 aa, synthetic construct
WTQN

SEQ ID NO: 6073 - protein, 4 aa, synthetic construct
KACR

SEQ ID NO: 6074 - protein, 4 aa, synthetic construct
RKQN

SEQ ID NO: 6075 - protein, 4 aa, synthetic construct
KCSV

SEQ ID NO: 6076 - protein, 4 aa, synthetic construct
KARI

SEQ ID NO: 6077 - protein, 4 aa, synthetic construct
FVQN

SEQ ID NO: 6078 - protein, 4 aa, synthetic construct
KLPK

SEQ ID NO: 6079 - protein, 4 aa, synthetic construct
KSEQ

SEQ ID NO: 6080 - protein, 4 aa, synthetic construct
VAQN

SEQ ID NO: 6081 - protein, 4 aa, synthetic construct
LYQN

SEQ ID NO: 6082 - protein, 4 aa, synthetic construct
KVRM

SEQ ID NO: 6083 - protein, 4 aa, synthetic construct
ALQN

SEQ ID NO: 6084 - protein, 4 aa, synthetic construct
SCTN

SEQ ID NO: 6085 - protein, 4 aa, synthetic construct
KNSR

SEQ ID NO: 6086 - protein, 4 aa, synthetic construct
KRKR

SEQ ID NO: 6087 - protein, 4 aa, synthetic construct
CTQN

SEQ ID NO: 6088 - protein, 4 aa, synthetic construct
TCLN

SEQ ID NO: 6089 - protein, 4 aa, synthetic construct
YARN

SEQ ID NO: 6090 - protein, 4 aa, synthetic construct
KQRP

SEQ ID NO: 6091 - protein, 4 aa, synthetic construct
KRVV

SEQ ID NO: 6092 - protein, 4 aa, synthetic construct
SGQN

SEQ ID NO: 6093 - protein, 4 aa, synthetic construct
YYSN

SEQ ID NO: 6094 - protein, 4 aa, synthetic construct
LTCN

SEQ ID NO: 6095 - protein, 4 aa, synthetic construct
CQSN

SEQ ID NO: 6096 - protein, 4 aa, synthetic construct
KAKG

SEQ ID NO: 6097 - protein, 4 aa, synthetic construct
KPQN

SEQ ID NO: 6098 - protein, 4 aa, synthetic construct
PFQN

SEQ ID NO: 6099 - protein, 4 aa, synthetic construct
KCTS

SEQ ID NO: 6100 - protein, 4 aa, synthetic construct
VFEN

SEQ ID NO: 6101 - protein, 4 aa, synthetic construct
KAKK

SEQ ID NO: 6102 - protein, 5 aa, synthetic construct
SKAQA

SEQ ID NO: 6103 - protein, 5 aa, synthetic construct
SKAQN

SEQ ID NO: 6104 - protein, 5 aa, synthetic construct
SMYMN

SEQ ID NO: 6105 - protein, 5 aa, synthetic construct
SKAFY

SEQ ID NO: 6106 - protein, 5 aa, synthetic construct
SKLKR

SEQ ID NO: 6107 - protein, 5 aa, synthetic construct
SKRHR

SEQ ID NO: 6108 - protein, 5 aa, synthetic construct
SKAQK

SEQ ID NO: 6109 - protein, 5 aa, synthetic construct
SKWRL

SEQ ID NO: 6110 - protein, 5 aa, synthetic construct
SRCRN

SEQ ID NO: 6111 - protein, 5 aa, synthetic construct
SFTCN

SEQ ID NO: 6112 - protein, 5 aa, synthetic construct
SKFFI

SEQ ID NO: 6113 - protein, 5 aa, synthetic construct
SKAQY

SEQ ID NO: 6114 - protein, 5 aa, synthetic construct
IVWQN

SEQ ID NO: 6115 - protein, 5 aa, synthetic construct
SKYFM

SEQ ID NO: 6116 - protein, 5 aa, synthetic construct
SKARQ

SEQ ID NO: 6117 - protein, 5 aa, synthetic construct
SCHQN

SEQ ID NO: 6118 - protein, 5 aa, synthetic construct
FPWQN

SEQ ID NO: 6119 - protein, 5 aa, synthetic construct
SKIRR

SEQ ID NO: 6120 - protein, 5 aa, synthetic construct
VYYQN

SEQ ID NO: 6121 - protein, 5 aa, synthetic construct
SLYWN

SEQ ID NO: 6122 - protein, 5 aa, synthetic construct
SKPKR

SEQ ID NO: 6123 - protein, 5 aa, synthetic construct
SKAFS

SEQ ID NO: 6124 - protein, 5 aa, synthetic construct
SRFWN

SEQ ID NO: 6125 - protein, 5 aa, synthetic construct
SKAQC

SEQ ID NO: 6126 - protein, 5 aa, synthetic construct
SRMRN

SEQ ID NO: 6127 - protein, 5 aa, synthetic construct
SVKKN

SEQ ID NO: 6128 - protein, 5 aa, synthetic construct
SWAPN

SEQ ID NO: 6129 - protein, 5 aa, synthetic construct
SLWKN

SEQ ID NO: 6130 - protein, 5 aa, synthetic construct
SKARW

SEQ ID NO: 6131 - protein, 5 aa, synthetic construct
SFRPN

SEQ ID NO: 6132 - protein, 5 aa, synthetic construct
SKKVF

SEQ ID NO: 6133 - protein, 5 aa, synthetic construct
SYAFN

SEQ ID NO: 6134 - protein, 5 aa, synthetic construct
SKACS

SEQ ID NO: 6135 - protein, 5 aa, synthetic construct
SKRLW

SEQ ID NO: 6136 - protein, 5 aa, synthetic construct
SCSRN

SEQ ID NO: 6137 - protein, 5 aa, synthetic construct
SRCPN

SEQ ID NO: 6138 - protein, 5 aa, synthetic construct
SGACN

SEQ ID NO: 6139 - protein, 5 aa, synthetic construct
SKFRQ

SEQ ID NO: 6140 - protein, 5 aa, synthetic construct
SFPFN

SEQ ID NO: 6141 - protein, 5 aa, synthetic construct
SFFGN

SEQ ID NO: 6142 - protein, 5 aa, synthetic construct
SMCQN

SEQ ID NO: 6143 - protein, 5 aa, synthetic construct
SKLFW

SEQ ID NO: 6144 - protein, 5 aa, synthetic construct
SKTRK

SEQ ID NO: 6145 - protein, 5 aa, synthetic construct
SGKRN

SEQ ID NO: 6146 - protein, 5 aa, synthetic construct
FYRQN

SEQ ID NO: 6147 - protein, 5 aa, synthetic construct
CRVQN

SEQ ID NO: 6148 - protein, 5 aa, synthetic construct
YGIQN

SEQ ID NO: 6149 - protein, 5 aa, synthetic construct
SKAQR

SEQ ID NO: 6150 - protein, 5 aa, synthetic construct
VNCQN

SEQ ID NO: 6151 - protein, 5 aa, synthetic construct
SKPFR

SEQ ID NO: 6152 - protein, 5 aa, synthetic construct
SLAWN

SEQ ID NO: 6153 - protein, 5 aa, synthetic construct
SKRSY

SEQ ID NO: 6154 - protein, 5 aa, synthetic construct
WSYQN

SEQ ID NO: 6155 - protein, 5 aa, synthetic construct
RWLQN

SEQ ID NO: 6156 - protein, 5 aa, synthetic construct
PSCQN

SEQ ID NO: 6157 - protein, 5 aa, synthetic construct
SSWLN

SEQ ID NO: 6158 - protein, 5 aa, synthetic construct
SKRRA

SEQ ID NO: 6159 - protein, 5 aa, synthetic construct
SKAQT

SEQ ID NO: 6160 - protein, 5 aa, synthetic construct
SKGCT

SEQ ID NO: 6161 - protein, 5 aa, synthetic construct
VPWQN

SEQ ID NO: 6162 - protein, 5 aa, synthetic construct
SKRYT

SEQ ID NO: 6163 - protein, 5 aa, synthetic construct
SGCQN

SEQ ID NO: 6164 - protein, 5 aa, synthetic construct
SFTPN

SEQ ID NO: 6165 - protein, 5 aa, synthetic construct
STTCN

SEQ ID NO: 6166 - protein, 5 aa, synthetic construct
SKARM

SEQ ID NO: 6167 - protein, 5 aa, synthetic construct
PKRQN

SEQ ID NO: 6168 - protein, 5 aa, synthetic construct
SKCFL

SEQ ID NO: 6169 - protein, 5 aa, synthetic construct
WVPQN

SEQ ID NO: 6170 - protein, 5 aa, synthetic construct
SFWSN

SEQ ID NO: 6171 - protein, 5 aa, synthetic construct
SKFKN

SEQ ID NO: 6172 - protein, 5 aa, synthetic construct
RIKQN

SEQ ID NO: 6173 - protein, 5 aa, synthetic construct
SKAPR

SEQ ID NO: 6174 - protein, 5 aa, synthetic construct
SFRYN

SEQ ID NO: 6175 - protein, 5 aa, synthetic construct
SKMIC

SEQ ID NO: 6176 - protein, 5 aa, synthetic construct
LRWQN

SEQ ID NO: 6177 - protein, 5 aa, synthetic construct
LPTQN

SEQ ID NO: 6178 - protein, 5 aa, synthetic construct
SKWKS

SEQ ID NO: 6179 - protein, 5 aa, synthetic construct
SYMRN

SEQ ID NO: 6180 - protein, 5 aa, synthetic construct
SKAAR

SEQ ID NO: 6181 - protein, 5 aa, synthetic construct
LLCQN

SEQ ID NO: 6182 - protein, 5 aa, synthetic construct
RCCQN

SEQ ID NO: 6183 - protein, 5 aa, synthetic construct
LCVQN

SEQ ID NO: 6184 - protein, 5 aa, synthetic construct
SKLTR

SEQ ID NO: 6185 - protein, 5 aa, synthetic construct
SKLCT

SEQ ID NO: 6186 - protein, 5 aa, synthetic construct
SKIRG

SEQ ID NO: 6187 - protein, 5 aa, synthetic construct
SYLVN

SEQ ID NO: 6188 - protein, 5 aa, synthetic construct
QGCQN

SEQ ID NO: 6189 - protein, 5 aa, synthetic construct
MAFQN

SEQ ID NO: 6190 - protein, 5 aa, synthetic construct
SKACQ

SEQ ID NO: 6191 - protein, 5 aa, synthetic construct
SKWGL

SEQ ID NO: 6192 - protein, 5 aa, synthetic construct
SKILR

SEQ ID NO: 6193 - protein, 5 aa, synthetic construct
SFQIN

SEQ ID NO: 6194 - protein, 5 aa, synthetic construct
SKACI

SEQ ID NO: 6195 - protein, 5 aa, synthetic construct
SKALR

SEQ ID NO: 6196 - protein, 5 aa, synthetic construct
SKAHA

SEQ ID NO: 6197 - protein, 5 aa, synthetic construct
SLCLN

SEQ ID NO: 6198 - protein, 5 aa, synthetic construct
SKAFV

SEQ ID NO: 6199 - protein, 5 aa, synthetic construct
RPWQN

SEQ ID NO: 6200 - protein, 5 aa, synthetic construct
RPRQN

SEQ ID NO: 6201 - protein, 5 aa, synthetic construct
SCPQN

SEQ ID NO: 6202 - protein, 5 aa, synthetic construct
SKAQF

SEQ ID NO: 6203 - protein, 5 aa, synthetic construct
SVRYN

SEQ ID NO: 6204 - protein, 5 aa, synthetic construct
SVRCN

SEQ ID NO: 6205 - protein, 5 aa, synthetic construct
SKMPC

SEQ ID NO: 6206 - protein, 5 aa, synthetic construct
SKKTS

SEQ ID NO: 6207 - protein, 5 aa, synthetic construct
SLPYN

SEQ ID NO: 6208 - protein, 5 aa, synthetic construct
VYHQN

SEQ ID NO: 6209 - protein, 5 aa, synthetic construct
SKAQS

SEQ ID NO: 6210 - protein, 5 aa, synthetic construct
SYTRN

SEQ ID NO: 6211 - protein, 5 aa, synthetic construct
LVYQN

SEQ ID NO: 6212 - protein, 5 aa, synthetic construct
YRYQN

SEQ ID NO: 6213 - protein, 5 aa, synthetic construct
SWLKN

SEQ ID NO: 6214 - protein, 5 aa, synthetic construct
SKAQM

SEQ ID NO: 6215 - protein, 5 aa, synthetic construct
CPAQN

SEQ ID NO: 6216 - protein, 5 aa, synthetic construct
SMCTN

SEQ ID NO: 6217 - protein, 5 aa, synthetic construct
SPPDN

SEQ ID NO: 6218 - protein, 5 aa, synthetic construct
SKRNY

SEQ ID NO: 6219 - protein, 5 aa, synthetic construct
RWTQN

SEQ ID NO: 6220 - protein, 5 aa, synthetic construct
SKACR

SEQ ID NO: 6221 - protein, 5 aa, synthetic construct
PRKQN

SEQ ID NO: 6222 - protein, 5 aa, synthetic construct
SKCSV

SEQ ID NO: 6223 - protein, 5 aa, synthetic construct
SKARI

SEQ ID NO: 6224 - protein, 5 aa, synthetic construct
PFVQN

SEQ ID NO: 6225 - protein, 5 aa, synthetic construct
SKLPK

SEQ ID NO: 6226 - protein, 5 aa, synthetic construct
SKSEQ

SEQ ID NO: 6227 - protein, 5 aa, synthetic construct
WVAQN

SEQ ID NO: 6228 - protein, 5 aa, synthetic construct
SLYQN

SEQ ID NO: 6229 - protein, 5 aa, synthetic construct
SKVRM

SEQ ID NO: 6230 - protein, 5 aa, synthetic construct
CALQN

SEQ ID NO: 6231 - protein, 5 aa, synthetic construct
SSCTN

SEQ ID NO: 6232 - protein, 5 aa, synthetic construct
SKNSR

SEQ ID NO: 6233 - protein, 5 aa, synthetic construct
SKRKR

SEQ ID NO: 6234 - protein, 5 aa, synthetic construct
LCTQN

SEQ ID NO: 6235 - protein, 5 aa, synthetic construct
STCLN

SEQ ID NO: 6236 - protein, 5 aa, synthetic construct
SYARN

SEQ ID NO: 6237 - protein, 5 aa, synthetic construct
SKQRP

SEQ ID NO: 6238 - protein, 5 aa, synthetic construct
SKRVV

SEQ ID NO: 6239 - protein, 5 aa, synthetic construct
KSGQN

SEQ ID NO: 6240 - protein, 5 aa, synthetic construct
SYYSN

SEQ ID NO: 6241 - protein, 5 aa, synthetic construct
SLTCN

SEQ ID NO: 6242 - protein, 5 aa, synthetic construct
SCQSN

SEQ ID NO: 6243 - protein, 5 aa, synthetic construct
SKAKG

SEQ ID NO: 6244 - protein, 5 aa, synthetic construct
SKPQN

SEQ ID NO: 6245 - protein, 5 aa, synthetic construct
FPFQN

SEQ ID NO: 6246 - protein, 5 aa, synthetic construct
SKCTS

SEQ ID NO: 6247 - protein, 5 aa, synthetic construct
SVFEN

SEQ ID NO: 6248 - protein, 5 aa, synthetic construct
SKAKK

SEQ ID NO: 6249 - protein, 5 aa, synthetic construct
GRYQN

SEQ ID NO: 6250 - protein, 11 aa, synthetic construct
GSGSPHSKAQA

SEQ ID NO: 6251 - protein, 11 aa, synthetic construct
GSGSPHSKAQN

SEQ ID NO: 6252 - protein, 11 aa, synthetic construct
GSGSPHSMYMN

SEQ ID NO: 6253 - protein, 11 aa, synthetic construct
GSGSPHSKAFY

SEQ ID NO: 6254 - protein, 11 aa, synthetic construct
GSGSPHSKLKR

SEQ ID NO: 6255 - protein, 11 aa, synthetic construct
GSGSPHSKRHR

SEQ ID NO: 6256 - protein, 11 aa, synthetic construct
GSGSPHSKAQK

SEQ ID NO: 6257 - protein, 11 aa, synthetic construct
GSGSPHSKWRL

SEQ ID NO: 6258 - protein, 11 aa, synthetic construct
GSGSPHSRCRN

SEQ ID NO: 6259 - protein, 11 aa, synthetic construct
GSGSPHSFTCN

SEQ ID NO: 6260 - protein, 11 aa, synthetic construct
GSGSPHSKFFI

SEQ ID NO: 6261 - protein, 11 aa, synthetic construct
GSGSPHSKAQY

SEQ ID NO: 6262 - protein, 11 aa, synthetic construct
GSGSPHIVWQN

SEQ ID NO: 6263 - protein, 11 aa, synthetic construct
GSGSPHSKYFM

SEQ ID NO: 6264 - protein, 11 aa, synthetic construct
GSGSPHSKARQ

SEQ ID NO: 6265 - protein, 11 aa, synthetic construct
GSGSPHSCHQN

SEQ ID NO: 6266 - protein, 11 aa, synthetic construct
GSGSPHFPWQN

SEQ ID NO: 6267 - protein, 11 aa, synthetic construct
GSGSPHSKIRR

SEQ ID NO: 6268 - protein, 11 aa, synthetic construct
GSGSPHVYYQN

SEQ ID NO: 6269 - protein, 11 aa, synthetic construct
GSGSPHSLYWN

SEQ ID NO: 6270 - protein, 11 aa, synthetic construct
GSGSPHSKPKR

SEQ ID NO: 6271 - protein, 11 aa, synthetic construct
GSGSPHSKAFS

SEQ ID NO: 6272 - protein, 11 aa, synthetic construct
GSGSPHSRFWN

SEQ ID NO: 6273 - protein, 11 aa, synthetic construct
GSGSPHSKAQC

SEQ ID NO: 6274 - protein, 11 aa, synthetic construct
GSGSPHSRMRN

SEQ ID NO: 6275 - protein, 11 aa, synthetic construct
GSGSPHSVKKN

SEQ ID NO: 6276 - protein, 11 aa, synthetic construct
GSGSPHSWAPN

SEQ ID NO: 6277 - protein, 11 aa, synthetic construct
GSGSPHSLWKN

SEQ ID NO: 6278 - protein, 11 aa, synthetic construct
GSGSPHSKARW

SEQ ID NO: 6279 - protein, 11 aa, synthetic construct
GSGSPHSFRPN

SEQ ID NO: 6280 - protein, 11 aa, synthetic construct
GSGSPHSKKVF

SEQ ID NO: 6281 - protein, 11 aa, synthetic construct
GSGSPHSYAFN

SEQ ID NO: 6282 - protein, 11 aa, synthetic construct
GSGSPHSKACS

SEQ ID NO: 6283 - protein, 11 aa, synthetic construct
GSGSPHSKRLW

SEQ ID NO: 6284 - protein, 11 aa, synthetic construct
GSGSPHSCSRN

SEQ ID NO: 6285 - protein, 11 aa, synthetic construct
GSGSPHSRCPN

SEQ ID NO: 6286 - protein, 11 aa, synthetic construct
GSGSPHSGACN

SEQ ID NO: 6287 - protein, 11 aa, synthetic construct
GSGSPHSKFRQ

SEQ ID NO: 6288 - protein, 11 aa, synthetic construct
GSGSPHSFPFN

SEQ ID NO: 6289 - protein, 11 aa, synthetic construct
GSGSPHSFFGN

SEQ ID NO: 6290 - protein, 11 aa, synthetic construct
GSGSPHSMCQN

SEQ ID NO: 6291 - protein, 11 aa, synthetic construct
GSGSPHSKLFW

SEQ ID NO: 6292 - protein, 11 aa, synthetic construct
GSGSPHSKTRK

SEQ ID NO: 6293 - protein, 11 aa, synthetic construct
GSGSPHSGKRN

SEQ ID NO: 6294 - protein, 11 aa, synthetic construct
GSGSPHFYRQN

SEQ ID NO: 6295 - protein, 11 aa, synthetic construct
GSGSPHCRVQN

SEQ ID NO: 6296 - protein, 11 aa, synthetic construct
GSGSPHYGIQN

SEQ ID NO: 6297 - protein, 11 aa, synthetic construct
GSGSPHSKAQR

SEQ ID NO: 6298 - protein, 11 aa, synthetic construct
GSGSPHVNCQN

SEQ ID NO: 6299 - protein, 11 aa, synthetic construct
GSGSPHSKPFR

SEQ ID NO: 6300 - protein, 11 aa, synthetic construct
GSGSPHSLAWN

SEQ ID NO: 6301 - protein, 11 aa, synthetic construct
GSGSPHSKRSY

SEQ ID NO: 6302 - protein, 11 aa, synthetic construct
GSGSPHWSYQN

SEQ ID NO: 6303 - protein, 11 aa, synthetic construct
GSGSPHRWLQN

SEQ ID NO: 6304 - protein, 11 aa, synthetic construct
GSGSPHPSCQN

SEQ ID NO: 6305 - protein, 11 aa, synthetic construct
GSGSPHSSWLN

SEQ ID NO: 6306 - protein, 11 aa, synthetic construct
GSGSPHSKRRA

SEQ ID NO: 6307 - protein, 11 aa, synthetic construct
GSGSPHSKAQT

SEQ ID NO: 6308 - protein, 11 aa, synthetic construct
GSGSPHSKGCT

SEQ ID NO: 6309 - protein, 11 aa, synthetic construct
GSGSPHVPWQN

SEQ ID NO: 6310 - protein, 11 aa, synthetic construct
GSGSPHSKRYT

SEQ ID NO: 6311 - protein, 11 aa, synthetic construct
GSGSPHSGCQN

SEQ ID NO: 6312 - protein, 11 aa, synthetic construct
GSGSPHSFTPN

SEQ ID NO: 6313 - protein, 11 aa, synthetic construct
GSGSPHSTTCN

SEQ ID NO: 6314 - protein, 11 aa, synthetic construct
GSGSPHSKARM

SEQ ID NO: 6315 - protein, 11 aa, synthetic construct
GSGSPHPKRQN

SEQ ID NO: 6316 - protein, 11 aa, synthetic construct
GSGSPHSKCFL

SEQ ID NO: 6317 - protein, 11 aa, synthetic construct
GSGSPHWVPQN

SEQ ID NO: 6318 - protein, 11 aa, synthetic construct
GSGSPHSFWSN

SEQ ID NO: 6319 - protein, 11 aa, synthetic construct
GSGSPHSKFKN

SEQ ID NO: 6320 - protein, 11 aa, synthetic construct
GSGSPHRIKQN

SEQ ID NO: 6321 - protein, 11 aa, synthetic construct
GSGSPHSKAPR

SEQ ID NO: 6322 - protein, 11 aa, synthetic construct
GSGSPHSFRYN

SEQ ID NO: 6323 - protein, 11 aa, synthetic construct
GSGSPHSKMIC

SEQ ID NO: 6324 - protein, 11 aa, synthetic construct
GSGSPHLRWQN

SEQ ID NO: 6325 - protein, 11 aa, synthetic construct
GSGSPHLPTQN

SEQ ID NO: 6326 - protein, 11 aa, synthetic construct
GSGSPHSKWKS

SEQ ID NO: 6327 - protein, 11 aa, synthetic construct
GSGSPHSYMRN

SEQ ID NO: 6328 - protein, 11 aa, synthetic construct
GSGSPHSKAAR

SEQ ID NO: 6329 - protein, 11 aa, synthetic construct
GSGSPHLLCQN

SEQ ID NO: 6330 - protein, 11 aa, synthetic construct
GSGSPHRCCQN

SEQ ID NO: 6331 - protein, 11 aa, synthetic construct
GSGSPHLCVQN

SEQ ID NO: 6332 - protein, 11 aa, synthetic construct
GSGSPHSKLTR

SEQ ID NO: 6333 - protein, 11 aa, synthetic construct
GSGSPHSKLCT

SEQ ID NO: 6334 - protein, 11 aa, synthetic construct
GSGSPHSKIRG

SEQ ID NO: 6335 - protein, 11 aa, synthetic construct
GSGSPHSYLVN

SEQ ID NO: 6336 - protein, 11 aa, synthetic construct
GSGSPHQGCQN

SEQ ID NO: 6337 - protein, 11 aa, synthetic construct
GSGSPHMAFQN

SEQ ID NO: 6338 - protein, 11 aa, synthetic construct
GSGSPHSKACQ

SEQ ID NO: 6339 - protein, 11 aa, synthetic construct
GSGSPHSKWGL

SEQ ID NO: 6340 - protein, 11 aa, synthetic construct
GSGSPHSKILR

SEQ ID NO: 6341 - protein, 11 aa, synthetic construct
GSGSPHSFQIN

SEQ ID NO: 6342 - protein, 11 aa, synthetic construct
GSGSPHSKACI

SEQ ID NO: 6343 - protein, 11 aa, synthetic construct
GSGSPHSKALR

SEQ ID NO: 6344 - protein, 11 aa, synthetic construct
GSGSPHSKAHA

SEQ ID NO: 6345 - protein, 11 aa, synthetic construct
GSGSPHSLCLN

SEQ ID NO: 6346 - protein, 11 aa, synthetic construct
GSGSPHSKAFV

SEQ ID NO: 6347 - protein, 11 aa, synthetic construct
GSGSPHRPWQN

SEQ ID NO: 6348 - protein, 11 aa, synthetic construct
GSGSPHRPRQN

SEQ ID NO: 6349 - protein, 11 aa, synthetic construct
GSGSPHSCPQN

SEQ ID NO: 6350 - protein, 11 aa, synthetic construct
GSGSPHSKAQF

SEQ ID NO: 6351 - protein, 11 aa, synthetic construct
GSGSPHSVRYN

SEQ ID NO: 6352 - protein, 11 aa, synthetic construct
GSGSPHSVRCN

SEQ ID NO: 6353 - protein, 11 aa, synthetic construct
GSGSPHSKMPC

SEQ ID NO: 6354 - protein, 11 aa, synthetic construct
GSGSPHSKKTS

SEQ ID NO: 6355 - protein, 11 aa, synthetic construct
GSGSPHSLPYN

SEQ ID NO: 6356 - protein, 11 aa, synthetic construct
GSGSPHVYHQN

SEQ ID NO: 6357 - protein, 11 aa, synthetic construct
GSGSPHSKAQS

SEQ ID NO: 6358 - protein, 11 aa, synthetic construct
GSGSPHSYTRN

SEQ ID NO: 6359 - protein, 11 aa, synthetic construct
GSGSPHLVYQN

SEQ ID NO: 6360 - protein, 11 aa, synthetic construct
GSGSPHYRYQN

SEQ ID NO: 6361 - protein, 11 aa, synthetic construct
GSGSPHSWLKN

SEQ ID NO: 6362 - protein, 11 aa, synthetic construct
GSGSPHSKAQM

SEQ ID NO: 6363 - protein, 11 aa, synthetic construct
GSGSPHCPAQN

SEQ ID NO: 6364 - protein, 11 aa, synthetic construct
GSGSPHSMCTN

SEQ ID NO: 6365 - protein, 11 aa, synthetic construct
GSGSPHSPPDN

SEQ ID NO: 6366 - protein, 11 aa, synthetic construct
GSGSPHSKRNY

SEQ ID NO: 6367 - protein, 11 aa, synthetic construct
GSGSPHRWTQN

SEQ ID NO: 6368 - protein, 11 aa, synthetic construct
GSGSPHSKACR

SEQ ID NO: 6369 - protein, 11 aa, synthetic construct
GSGSPHPRKQN

SEQ ID NO: 6370 - protein, 11 aa, synthetic construct
GSGSPHSKCSV

SEQ ID NO: 6371 - protein, 11 aa, synthetic construct
GSGSPHSKARI

SEQ ID NO: 6372 - protein, 11 aa, synthetic construct
GSGSPHPFVQN

SEQ ID NO: 6373 - protein, 11 aa, synthetic construct
GSGSPHSKLPK

SEQ ID NO: 6374 - protein, 11 aa, synthetic construct
GSGSPHSKSEQ

SEQ ID NO: 6375 - protein, 11 aa, synthetic construct
GSGSPHWVAQN

SEQ ID NO: 6376 - protein, 11 aa, synthetic construct
GSGSPHSLYQN

SEQ ID NO: 6377 - protein, 11 aa, synthetic construct
GSGSPHSKVRM

SEQ ID NO: 6378 - protein, 11 aa, synthetic construct
GSGSPHCALQN

SEQ ID NO: 6379 - protein, 11 aa, synthetic construct
GSGSPHSSCTN

SEQ ID NO: 6380 - protein, 11 aa, synthetic construct
GSGSPHSKNSR

SEQ ID NO: 6381 - protein, 11 aa, synthetic construct
GSGSPHSKRKR

SEQ ID NO: 6382 - protein, 11 aa, synthetic construct
GSGSPHLCTQN

SEQ ID NO: 6383 - protein, 11 aa, synthetic construct
GSGSPHSTCLN

SEQ ID NO: 6384 - protein, 11 aa, synthetic construct
GSGSPHSYARN

SEQ ID NO: 6385 - protein, 11 aa, synthetic construct
GSGSPHSKQRP

SEQ ID NO: 6386 - protein, 11 aa, synthetic construct
GSGSPHSKRVV

SEQ ID NO: 6387 - protein, 11 aa, synthetic construct
GSGSPHKSGQN

SEQ ID NO: 6388 - protein, 11 aa, synthetic construct
GSGSPHSYYSN

SEQ ID NO: 6389 - protein, 11 aa, synthetic construct
GSGSPHSLTCN

SEQ ID NO: 6390 - protein, 11 aa, synthetic construct
GSGSPHSCQSN

SEQ ID NO: 6391 - protein, 11 aa, synthetic construct
GSGSPHSKAKG

SEQ ID NO: 6392 - protein, 11 aa, synthetic construct
GSGSPHSKPQN

SEQ ID NO: 6393 - protein, 11 aa, synthetic construct
GSGSPHFPFQN

SEQ ID NO: 6394 - protein, 11 aa, synthetic construct
GSGSPHSKCTS

SEQ ID NO: 6395 - protein, 11 aa, synthetic construct
GSGSPHSVFEN

SEQ ID NO: 6396 - protein, 11 aa, synthetic construct
GSGSPHSKAKK

SEQ ID NO: 6397 - protein, 11 aa, synthetic construct
GSGSPHGRYQN

SEQ ID NO: 6398 - protein, 4 aa, synthetic construct
SPHK

SEQ ID NO: 6399 - protein, 11 aa, synthetic construct
ERVSGSPHSKA

SEQ ID NO: 6400 - protein, 12 aa, synthetic construct
AEIGHDSPHKSG

SEQ ID NO: 6401 - protein, 11 aa, synthetic construct
EKMSGSPHSKA

SEQ ID NO: 6402 - protein, 11 aa, synthetic construct
HDSPHSKAQNL

SEQ ID NO: 6403 - protein, 11 aa, synthetic construct
VNGHDSPHSKA

SEQ ID NO: 6404 - protein, 27 aa, synthetic construct
KTINGSGQNQQTLKFSVAGPSNMAVQG

SEQ ID NO: 6405 - protein, 12 aa, synthetic construct
KTINGSGQNQQT

SEQ ID NO: 6406 - protein, 8 aa, synthetic construct
GSGQNQQT

SEQ ID NO: 6407 - protein, 9 aa, synthetic construct
  VARIANT 1: note = Any amino acid
  VARIANT 7: note = Any amino acid
  VARIANT 9: note = Any amino acid
XSGSPHXKX

SEQ ID NO: 6408 - protein, 9 aa, synthetic construct
  VARIANT 1: note = Any amino acid
  VARIANT 2: note = Any amino acid other than S
  VARIANT 3: note = Any amino acid other than G
  VARIANT 8: note = Any amino acid
  VARIANT 9: note = Any amino acid
XXXSPHKXX

SEQ ID NO: 6409 - protein, 18 aa, synthetic construct
KIESGHDSPHKSGQNQQT

SEQ ID NO: 6410 - protein, 18 aa, synthetic construct
KTAKDHDSPHKSGQNQQT

SEQ ID NO: 6411 - protein, 18 aa, synthetic construct
KMEVGHDSPHKSGQNQQT

SEQ ID NO: 6412 - protein, 18 aa, synthetic construct
KCEIGHDSPHKSGQNQQT

SEQ ID NO: 6413 - protein, 18 aa, synthetic construct
KATNGHDSPHKSGLNQQT

SEQ ID NO: 6414 - protein, 18 aa, synthetic construct
KMDGGHDSPHKSGQNQQT

SEQ ID NO: 6415 - protein, 18 aa, synthetic construct
KQEVGHDSPHKSGQNQQT

SEQ ID NO: 6416 - protein, 18 aa, synthetic construct
KADQGHDSPHKSGQNQQT

SEQ ID NO: 6417 - protein, 18 aa, synthetic construct
KTINGHESPHKSAQNHQT

SEQ ID NO: 6418 - protein, 18 aa, synthetic construct
KTINGHDSPHKSAQNQWT

SEQ ID NO: 6419 - protein, 18 aa, synthetic construct
KNMNGHDSPHKSGQNTHS

SEQ ID NO: 6420 - protein, 18 aa, synthetic construct
KTPWEHDSPHKSGQNQQT

SEQ ID NO: 6421 - protein, 13 aa, synthetic construct
ISGSPHSKAQNQQ

SEQ ID NO: 6422 - protein, 13 aa, synthetic construct
GPGSPHSKAHNQQ

SEQ ID NO: 6423 - protein, 13 aa, synthetic construct
GSGSPHSKSQNQL

SEQ ID NO: 6424 - protein, 13 aa, synthetic construct
GSGSPHSKAQGQQ

SEQ ID NO: 6425 - protein, 13 aa, synthetic construct
LSGSPHSKAQNQQ

SEQ ID NO: 6426 - protein, 13 aa, synthetic construct
GSGSPHSKAHNQQ

SEQ ID NO: 6427 - protein, 13 aa, synthetic construct
GSGSPHSKTQNQQ

SEQ ID NO: 6428 - protein, 13 aa, synthetic construct
GGGSPHSKAQTQQ

SEQ ID NO: 6429 - protein, 13 aa, synthetic construct
GSGSPHSKAQNPP

SEQ ID NO: 6430 - protein, 13 aa, synthetic construct
GSGSPHSKAQYQQ

SEQ ID NO: 6431 - protein, 13 aa, synthetic construct
GNGSPHSKAQNKQ

SEQ ID NO: 6432 - protein, 13 aa, synthetic construct
GSGSPHSKRPEQQ

SEQ ID NO: 6433 - protein, 13 aa, synthetic construct
GSGSPHSKAQRTM

SEQ ID NO: 6434 - protein, 13 aa, synthetic construct
HSGSPHSKAQNQQ

SEQ ID NO: 6435 - protein, 13 aa, synthetic construct
GGGSPHSKALNQQ

SEQ ID NO: 6436 - protein, 13 aa, synthetic construct
GSGSPHSKAQHRI

SEQ ID NO: 6437 - protein, 13 aa, synthetic construct
GSGSPHSKAQSTM

SEQ ID NO: 6438 - protein, 13 aa, synthetic construct
GSGSPHSKAQREM

SEQ ID NO: 6439 - protein, 13 aa, synthetic construct
GGGSPHSKAQRQQ

SEQ ID NO: 6440 - protein, 13 aa, synthetic construct
GSGSPHSKNQWQQ

SEQ ID NO: 6441 - protein, 13 aa, synthetic construct
GSGSPHSKAQRMN

SEQ ID NO: 6442 - protein, 15 aa, synthetic construct
GGGGSGGGGSGGGGS

SEQ ID NO: 6443 - protein, 13 aa, synthetic construct
TSGSPHSKAQNQQ

SEQ ID NO: 6444 - protein, 13 aa, synthetic construct
GSGSPHSKAHVRQ

SEQ ID NO: 6445 - protein, 13 aa, synthetic construct
GSGSPHSKAPNQH

SEQ ID NO: 6446 - protein, 13 aa, synthetic construct
GSGSPHSKTQSQQ

SEQ ID NO: 6447 - protein, 13 aa, synthetic construct
ESGSPHSKAQNQQ

SEQ ID NO: 6448 - protein, 13 aa, synthetic construct
GSGSPHSKAQPAK

SEQ ID NO: 6449 - protein, 13 aa, synthetic construct
SSGSPHSKAQNQQ

SEQ ID NO: 6450 - protein, 13 aa, synthetic construct
GNGSPHSKAQNQQ

SEQ ID NO: 6451 - protein, 13 aa, synthetic construct
GSGSPHSKSQTQQ

SEQ ID NO: 6452 - protein, 13 aa, synthetic construct
ASGSPHSKAQNQQ

SEQ ID NO: 6453 - protein, 13 aa, synthetic construct
GSGSPHSKAQNLA

SEQ ID NO: 6454 - protein, 13 aa, synthetic construct
NSGSPHSKAQNQQ

SEQ ID NO: 6455 - protein, 13 aa, synthetic construct
VSGSPHSKAQNQQ

SEQ ID NO: 6456 - protein, 13 aa, synthetic construct
GSGSPHSKALNRQ

SEQ ID NO: 6457 - protein, 13 aa, synthetic construct
GSGSPHSKGQNPP

SEQ ID NO: 6458 - protein, 536 aa, Homo sapiens; identical to SEQ ID NO: 1774

SEQ ID NO: 6459 - DNA, 2291 bp, Homo sapiens
  source 1..2291: mol_type = genomic DNA
ggaattacttgcagggctaacctagtgcctatagctaaggcaggtacctgcatccttgtttttgtttagtggatcctctatccttcagagactctggaacccctgtggtcttctcttcatctaatgaccctgaggggatggagttttcaagtccttccagagaggaatgtcccaagcctttgagtagggtaagcatcatggctggcagcctcacaggattgcttctacttcaggcagtgtcgtgggcatcaggtgcccgcccctgcatccctaaaagcttcggctacagctcggtggtgtgtgtctgcaatgccacatactgtgactcctttgaccccccgacctttcctgcccttggtaccttcagccgctatgagagtacacgcagtgggcgacggatggagctgagtatggggcccatccaggctaatcacacgggcacaggcctgctactgaccctgcagccagaacagaagttccagaaagtgaagggatttggaggggccatgacagatgctgctgctctcaacatccttgccctgtcaccccctgcccaaaatttgctacttaaatcgtacttctctgaagaaggaatcggatataacatcatccgggtacccatggccagctgtgacttctccatccgcacctacacctatgcagacacccctgatgatttccagttgcacaacttcagcctcccagaggaagataccaagctcaagatacccctgattcaccgagccctgcagttggcccagcgtcccgtttcactccttgccagcccctggacatcacccacttggctcaagaccaatggagcggtgaatgggaaggggtcactcaagggacagcccggagacatctaccaccagacctgggccagatactttgtgaagttcctggatgcctatgctgagcacaagttacagttctgggcagtgacagctgaaaatgagccttctgctgggctgttgagtggataccccttccagtgcctgggcttcacccctgaacatcagcgagacttcattgcccgtgacctaggtcctaccctcgccaacagtactcaccacaatgtccgcctactcatgctggatgaccaacgcttgctgctgccccactgggcaaaggtggtactgacagacccagaagcagctaaatatgttcatggcattgctgtacattggtacctggactttctggctccagccaaagccaccctaggggagacacaccgcctgttccccaacaccatgctctttgcctcagaggcctgtgtgggctccaagttctgggagcagagtgtgcggctaggctcctgggatcgagggatgcagtacagccacagcatcatcacgaacctcctgtaccatgtggtcggctggaccgactggaaccttgccctgaaccccgaaggaggacccaattgggtgcgtaactttgtcgacagtcccatcattgtagacatcaccaaggacacgttttacaaacagcccatgttctaccaccttggccacttcagcaagttcattcctgagggctcccagagagtggggctggttgccagtcagaagaacgacctggacgcagtggcactgatgcatcccgatggctctgctgttgtggtcgtgctaaaccgctcctctaaggatgtgcctcttaccatcaaggatcctgctgtgggcttcctggagacaatctcacctggctactccattcacacctacctgtggcgtcgccagtgatggagcagatactcaaggaggcactgggctcagcctgggcattaaagggacagagtcagctcacacgctgtctgtgactaaagagggcacagcagggccagtgtgagcttacagcgacgtaagcccaggggcaatggtttgggtgactcactttcccctctaggtggtgccaggggctggaggcccctagaaaaagatcagtaagccccagtgtccccccagcccccatgcttatgtgaacatgcgctgtgtgctgcttgctttggaaactgggcctgggtccaggcctagggtgagctcactgtccgtacaaacacaagatcagggctgagggtaaggaaaagaagagactaggaaagctgggcccaaaactggagactgtttgtctttcctggagatgcagaactgggcccgtggagcagcagtgtcagcatcagggcggaagccttaaagcagcagcgggtgtgcccaggcacccagatgattcctatggcaccagccaggaaaaatggcagctcttaaaggagaaaatgtttgagccca

SEQ ID NO: 6460 - protein, 536 aa, Homo sapiens; identical to SEQ ID NO: 1774

SEQ ID NO: 6461 - DNA, 2344 bp, Homo sapiens
  source 1..2344: mol_type = genomic DNA
atcctgccttcagagtcttactgcgcggggccccagtctccagtcccgcccaggcgcctttgcaggctgcggtgggatttcgttttgcctccggttggggctgctgtttctcttcgccgacgtggatcctctatccttcagagactctggaacccctgtggtcttctcttcatctaatgaccctgaggggatggagttttcaagtccttccagagaggaatgtcccaagcctttgagtagggtaagcatcatggctggcagcctcacaggattgcttctacttcaggcagtgtcgtgggcatcaggtgcccgcccctgcatccctaaaagcttcggctacagctcggtggtgtgtgtctgcaatgccacatactgtgactcctttgaccccccgacctttcctgcccttggtaccttcagccgctatgagagtacacgcagtgggcgacggatggagctgagtatggggcccatccaggctaatcacacgggcacaggcctgctactgaccctgcagccagaacagaagttccagaaagtgaagggatttggaggggccatgacagatgctgctgctctcaacatccttgccctgtcaccccctgcccaaaatttgctacttaaatcgtacttctctgaagaaggaatcggatataacatcatccgggtacccatggccagctgtgacttctccatccgcacctacacctatgcagacacccctgatgatttccagttgcacaacttcagcctcccagaggaagataccaagctcaagatacccctgattcaccgagccctgcagttggcccagcgtcccgtttcactccttgccagcccctggacatcacccacttggctcaagaccaatggagcggtgaatgggaaggggtcactcaagggacagcccggagacatctaccaccagacctgggccagatactttgtgaagttcctggatgcctatgctgagcacaagttacagttctgggcagtgacagctgaaaatgagccttctgctgggctgttgagtggataccccttccagtgcctgggcttcacccctgaacatcagcgagacttcattgcccgtgacctaggtcctaccctcgccaacagtactcaccacaatgtccgcctactcatgctggatgaccaacgcttgctgctgccccactgggcaaaggtggtactgacagacccagaagcagctaaatatgttcatggcattgctgtacattggtacctggactttctggctccagccaaagccaccctaggggagacacaccgcctgttccccaacaccatgctctttgcctcagaggcctgtgtgggctccaagttctgggagcagagtgtgcggctaggctcctgggatcgagggatgcagtacagccacagcatcatcacgaacctcctgtaccatgtggtcggctggaccgactggaaccttgccctgaaccccgaaggaggacccaattgggtgcgtaactttgtcgacagtcccatcattgtagacatcaccaaggacacgttttacaaacagcccatgttctaccaccttggccacttcagcaagttcattcctgagggctcccagagagtggggctggttgccagtcagaagaacgacctggacgcagtggcactgatgcatcccgatggctctgctgttgtggtcgtgctaaaccgctcctctaaggatgtgcctcttaccatcaaggatcctgctgtgggcttcctggagacaatctcacctggctactccattcacacctacctgtggcgtcgccagtgatggagcagatactcaaggaggcactgggctcagcctgggcattaaagggacagagtcagctcacacgctgtctgtgactaaagagggcacagcagggccagtgtgagcttacagcgacgtaagcccaggggcaatggtttgggtgactcactttcccctctaggtggtgccaggggctggaggcccctagaaaaagatcagtaagccccagtgtccccccagcccccatgcttatgtgaacatgcgctgtgtgctgcttgctttggaaactgggcctgggtccaggcctagggtgagctcactgtccgtacaaacacaagatcagggctgagggtaaggaaaagaagagactaggaaagctgggcccaaaactggagactgtttgtctttcctggagatgcagaactgggcccgtggagcagcagtgtcagcatcagggcggaagccttaaagcagcagcgggtgtgcccaggcacccagatgattcctatggcaccagccaggaaaaatggcagctcttaaaggagaaaatgtttgagccca

SEQ ID NO: 6462 - protein, 536 aa, Homo sapiens; identical to SEQ ID NO: 1774

SEQ ID NO: 6463 - DNA, 2325 bp, Homo sapiens
  source 1..2325: mol_type = genomic DNA
atcctgccttcagagtcttactgcgcggggccccagtctccagtcccgcccaggcgcctttgcaggctgcggtgggatttcgttttgcctccggttggggctgctgtttctcttcgccgacgagactctggaacccctgtggtcttctcttcatctaatgaccctgaggggatggagttttcaagtccttccagagaggaatgtcccaagcctttgagtagggtaagcatcatggctggcagcctcacaggattgcttctacttcaggcagtgtcgtgggcatcaggtgcccgcccctgcatccctaaaagcttcggctacagctcggtggtgtgtgtctgcaatgccacatactgtgactcctttgaccccccgacctttcctgcccttggtaccttcagccgctatgagagtacacgcagtgggcgacggatggagctgagtatggggcccatccaggctaatcacacgggcacaggcctgctactgaccctgcagccagaacagaagttccagaaagtgaagggatttggaggggccatgacagatgctgctgctctcaacatccttgccctgtcaccccctgcccaaaatttgctacttaaatcgtacttctctgaagaaggaatcggatataacatcatccgggtacccatggccagctgtgacttctccatccgcacctacacctatgcagacacccctgatgatttccagttgcacaacttcagcctcccagaggaagataccaagctcaagatacccctgattcaccgagccctgcagttggcccagcgtcccgtttcactccttgccagcccctggacatcacccacttggctcaagaccaatggagcggtgaatgggaaggggtcactcaagggacagcccggagacatctaccaccagacctgggccagatactttgtgaagttcctggatgcctatgctgagcacaagttacagttctgggcagtgacagctgaaaatgagccttctgctgggctgttgagtggataccccttccagtgcctgggcttcacccctgaacatcagcgagacttcattgcccgtgacctaggtcctaccctcgccaacagtactcaccacaatgtccgcctactcatgctggatgaccaacgcttgctgctgccccactgggcaaaggtggtactgacagacccagaagcagctaaatatgttcatggcattgctgtacattggtacctggactttctggctccagccaaagccaccctaggggagacacaccgcctgttccccaacaccatgctctttgcctcagaggcctgtgtgggctccaagttctgggagcagagtgtgcggctaggctcctgggatcgagggatgcagtacagccacagcatcatcacgaacctcctgtaccatgtggtcggctggaccgactggaaccttgccctgaaccccgaaggaggacccaattgggtgcgtaactttgtcgacagtcccatcattgtagacatcaccaaggacacgttttacaaacagcccatgttctaccaccttggccacttcagcaagttcattcctgagggctcccagagagtggggctggttgccagtcagaagaacgacctggacgcagtggcactgatgcatcccgatggctctgctgttgtggtcgtgctaaaccgctcctctaaggatgtgcctcttaccatcaaggatcctgctgtgggcttcctggagacaatctcacctggctactccattcacacctacctgtggcgtcgccagtgatggagcagatactcaaggaggcactgggctcagcctgggcattaaagggacagagtcagctcacacgctgtctgtgactaaagagggcacagcagggccagtgtgagcttacagcgacgtaagcccaggggcaatggtttgggtgactcactttcccctctaggtggtgccaggggctggaggcccctagaaaaagatcagtaagccccagtgtccccccagcccccatgcttatgtgaacatgcgctgtgtgctgcttgctttggaaactgggcctgggtccaggcctagggtgagctcactgtccgtacaaacacaagatcagggctgagggtaaggaaaagaagagactaggaaagctgggcccaaaactggagactgtttgtctttcctggagatgcagaactgggcccgtggagcagcagtgtcagcatcagggcggaagccttaaagcagcagcgggtgtgcccaggcacccagatgattcctatggcaccagccaggaaaaatggcagctcttaaaggagaaaatgtttgagccca

SEQ ID NO: 6464 - protein, 449 aa, Homo sapiens
MELSMGPIQANHTGTGLLLTLQPEQKFQKVKGFGGAMTDAAALNILALSPPAQNLLLKSYFSEEGIGYNIIRVPMASCDFSIRTYTYADTPDDFQLHNFSLPEEDTKLKIPLIHRALQLAQRPVSLLASPWTSPTWLKTNGAVNGKGSLKGQPGDIYHQTWARYFVKFLDAYAEHKLQFWAVTAENEPSAGLLSGYPFQCLGFTPEHQRDFIARDLGPTLANSTHHNVRLLMLDDQRLLLPHWAKVVLTDPEAAKYVHGIAVHWYLDFLAPAKATLGETHRLFPNTMLFASEACVGSKFWEQSVRLGSWDRGMQYSHSIITNLLYHVVGWTDWNLALNPEGGPNWVRNFVDSPIIVDITKDTFYKQPMFYHLGHFSKFIPEGSQRVGLVASQKNDLDAVALMHPDGSAVVVVLNRSSKDVPLTIKDPAVGFLETISPGYSIHTYLWRRQ

SEQ ID NO: 6465 - DNA, 2161 bp, Homo sapiens
  source 1..2161: mol_type = genomic DNA
atcctgccttcagagtcttactgcgcggggccccagtctccagtcccgcccaggcgcctttgcaggctgcggtgggatttcgttttgcctccggttggggctgctgtttctcttcgccgacggtgcccgcccctgcatccctaaaagcttcggctacagctcggtggtgtgtgtctgcaatgccacatactgtgactcctttgaccccccgacctttcctgcccttggtaccttcagccgctatgagagtacacgcagtgggcgacggatggagctgagtatggggcccatccaggctaatcacacgggcacaggcctgctactgaccctgcagccagaacagaagttccagaaagtgaagggatttggaggggccatgacagatgctgctgctctcaacatccttgccctgtcaccccctgcccaaaatttgctacttaaatcgtacttctctgaagaaggaatcggatataacatcatccgggtacccatggccagctgtgacttctccatccgcacctacacctatgcagacacccctgatgatttccagttgcacaacttcagcctcccagaggaagataccaagctcaagatacccctgattcaccgagccctgcagttggcccagcgtcccgtttcactccttgccagcccctggacatcacccacttggctcaagaccaatggagcggtgaatgggaaggggtcactcaagggacagcccggagacatctaccaccagacctgggccagatactttgtgaagttcctggatgcctatgctgagcacaagttacagttctgggcagtgacagctgaaaatgagccttctgctgggctgttgagtggataccccttccagtgcctgggcttcacccctgaacatcagcgagacttcattgcccgtgacctaggtcctaccctcgccaacagtactcaccacaatgtccgcctactcatgctggatgaccaacgcttgctgctgccccactgggcaaaggtggtactgacagacccagaagcagctaaatatgttcatggcattgctgtacattggtacctggactttctggctccagccaaagccaccctaggggagacacaccgcctgttccccaacaccatgctctttgcctcagaggcctgtgtgggctccaagttctgggagcagagtgtgcggctaggctcctgggatcgagggatgcagtacagccacagcatcatcacgaacctcctgtaccatgtggtcggctggaccgactggaaccttgccctgaaccccgaaggaggacccaattgggtgcgtaactttgtcgacagtcccatcattgtagacatcaccaaggacacgttttacaaacagcccatgttctaccaccttggccacttcagcaagttcattcctgagggctcccagagagtggggctggttgccagtcagaagaacgacctggacgcagtggcactgatgcatcccgatggctctgctgttgtggtcgtgctaaaccgctcctctaaggatgtgcctcttaccatcaaggatcctgctgtgggcttcctggagacaatctcacctggctactccattcacacctacctgtggcgtcgccagtgatggagcagatactcaaggaggcactgggctcagcctgggcattaaagggacagagtcagctcacacgctgtctgtgactaaagagggcacagcagggccagtgtgagcttacagcgacgtaagcccaggggcaatggtttgggtgactcactttcccctctaggtggtgccaggggctggaggcccctagaaaaagatcagtaagccccagtgtccccccagcccccatgcttatgtgaacatgcgctgtgtgctgcttgctttggaaactgggcctgggtccaggcctagggtgagctcactgtccgtacaaacacaagatcagggctgagggtaaggaaaagaagagactaggaaagctgggcccaaaactggagactgtttgtctttcctggagatgcagaactgggcccgtggagcagcagtgtcagcatcagggcggaagccttaaagcagcagcgggtgtgcccaggcacccagatgattcctatggcaccagccaggaaaaatggcagctcttaaaggagaaaatgtttgagccca

SEQ ID NO: 6466 - protein, 487 aa, Homo sapiens
MEFSSPSREECPKPLSRVSIMAGSLTGLLLLQAVSWASGARPCIPKSFGYSSVVCVCNATYCDSFDPPTFPALGTFSRYESTRSGRRMELSMGPIQANHTGTGIGYNIIRVPMASCDFSIRTYTYADTPDDFQLHNFSLPEEDTKLKIPLIHRALQLAQRPVSLLASPWTSPTWLKTNGAVNGKGSLKGQPGDIYHQTWARYFVKFLDAYAEHKLQFWAVTAENEPSAGLLSGYPFQCLGFTPEHQRDFIARDLGPTLANSTHHNVRLLMLDDQRLLLPHWAKVVLTDPEAAKYVHGIAVHWYLDFLAPAKATLGETHRLFPNTMLFASEACVGSKFWEQSVRLGSWDRGMQYSHSIITNLLYHVVGWTDWNLALNPEGGPNWVRNFVDSPIIVDITKDTFYKQPMFYHLGHFSKFIPEGSQRVGLVASQKNDLDAVALMHPDGSAVVVVLNRSSKDVPLTIKDPAVGFLETISPGYSIHTYLWRRQ

SEQ ID NO: 6467 - DNA, 2144 bp, Homo sapiens
  source 1..2144: mol_type = genomic DNA
ggaattacttgcagggctaacctagtgcctatagctaaggcaggtacctgcatccttgtttttgtttagtggatcctctatccttcagagactctggaacccctgtggtcttctcttcatctaatgaccctgaggggatggagttttcaagtccttccagagaggaatgtcccaagcctttgagtagggtaagcatcatggctggcagcctcacaggattgcttctacttcaggcagtgtcgtgggcatcaggtgcccgcccctgcatccctaaaagcttcggctacagctcggtggtgtgtgtctgcaatgccacatactgtgactcctttgaccccccgacctttcctgcccttggtaccttcagccgctatgagagtacacgcagtgggcgacggatggagctgagtatggggcccatccaggctaatcacacgggcacaggaatcggatataacatcatccgggtacccatggccagctgtgacttctccatccgcacctacacctatgcagacacccctgatgatttccagttgcacaacttcagcctcccagaggaagataccaagctcaagatacccctgattcaccgagccctgcagttggcccagcgtcccgtttcactccttgccagcccctggacatcacccacttggctcaagaccaatggagcggtgaatgggaaggggtcactcaagggacagcccggagacatctaccaccagacctgggccagatactttgtgaagttcctggatgcctatgctgagcacaagttacagttctgggcagtgacagctgaaaatgagccttctgctgggctgttgagtggataccccttccagtgcctgggcttcacccctgaacatcagcgagacttcattgcccgtgacctaggtcctaccctcgccaacagtactcaccacaatgtccgcctactcatgctggatgaccaacgcttgctgctgccccactgggcaaaggtggtactgacagacccagaagcagctaaatatgttcatggcattgctgtacattggtacctggactttctggctccagccaaagccaccctaggggagacacaccgcctgttccccaacaccatgctctttgcctcagaggcctgtgtgggctccaagttctgggagcagagtgtgcggctaggctcctgggatcgagggatgcagtacagccacagcatcatcacgaacctcctgtaccatgtggtcggctggaccgactggaaccttgccctgaaccccgaaggaggacccaattgggtgcgtaactttgtcgacagtcccatcattgtagacatcaccaaggacacgttttacaaacagcccatgttctaccaccttggccacttcagcaagttcattcctgagggctcccagagagtggggctggttgccagtcagaagaacgacctggacgcagtggcactgatgcatcccgatggctctgctgttgtggtcgtgctaaaccgctcctctaaggatgtgcctcttaccatcaaggatcctgctgtgggcttcctggagacaatctcacctggctactccattcacacctacctgtggcgtcgccagtgatggagcagatactcaaggaggcactgggctcagcctgggcattaaagggacagagtcagctcacacgctgtctgtgactaaagagggcacagcagggccagtgtgagcttacagcgacgtaagcccaggggcaatggtttgggtgactcactttcccctctaggtggtgccaggggctggaggcccctagaaaaagatcagtaagccccagtgtccccccagcccccatgcttatgtgaacatgcgctgtgtgctgcttgctttggaaactgggcctgggtccaggcctagggtgagctcactgtccgtacaaacacaagatcagggctgagggtaaggaaaagaagagactaggaaagctgggcccaaaactggagactgtttgtctttcctggagatgcagaactgggcccgtggagcagcagtgtcagcatcagggcggaagccttaaagcagcagcgggtgtgcccaggcacccagatgattcctatggcaccagccaggaaaaatggcagctcttaaaggagaaaatgtttgagccca

SEQ ID NO: 6468 - protein, 18 aa, synthetic construct
KAEVGHDSPHKSGQNQQT

SEQ ID NO: 6469 - protein, 18 aa, synthetic construct
KMDAGHDSPHKSGQNQQT

SEQ ID NO: 6470 - protein, 18 aa, synthetic construct
KVEWGHDSPHKSGQNQQT

SEQ ID NO: 6471 - protein, 18 aa, synthetic construct
KAEQGHDSPHKSGQNQQT

SEQ ID NO: 6472 - protein, 18 aa, synthetic construct
KLEWGHDSPHKSGQNQQT

SEQ ID NO: 6473 - protein, 18 aa, synthetic construct
KTINGHPSPHYLGQNQQT

SEQ ID NO: 6474 - protein, 18 aa, synthetic construct
KTINGHLSPHYYGQNQQT

SEQ ID NO: 6475 - protein, 18 aa, synthetic construct
KMELGHDSPHKSGQNQQT

SEQ ID NO: 6476 - protein, 18 aa, synthetic construct
KMETGHDSPHKSGQNQQT

SEQ ID NO: 6477 - protein, 18 aa, synthetic construct
KMEAGHDSPHKSGQNQQT

SEQ ID NO: 6478 - protein, 18 aa, synthetic construct
KTINGHDSPHLLWQNQQT

SEQ ID NO: 6479 - protein, 18 aa, synthetic construct
KTINRQRSPHKSGQNQQT

SEQ ID NO: 6480 - protein, 18 aa, synthetic construct
KMEMGHDSPHKSGQNQQT